(19) United States
(12) Patent Application Publication
(10) Pub. No.: US 2024/0360476 A1
(43) Pub. Date: Oct. 31, 2024

(54) Genome Editing Compositions and Methods for Treatment of Myotonic Dystrophy

(71) Applicant: Prime Medicine, Inc., Cambridge, MA (US)

(72) Inventors: Tyler HARVEY, Cambridge, MA (US); Yu ZHENG, Cambridge, MA (US); Ekaterina Alexeevna KOSHELEVA, Cambridge, MA (US); Chicheng SUN, Cambridge, MA (US); Spencer TANG, Cambridge, MA (US)

(21) Appl. No.: 18/294,729

(22) PCT Filed: Aug. 5, 2022
(86) PCT No.: PCT/US2022/039644

§ 371 Date: Feb. 2, 2024

Related U.S. Application Data
(60) Provisional application No. 63/229,768, filed on Aug. 5, 2021.

(51) Int. Cl. C12N 15/90; C12N 9/12; C12N 9/22; C12N 15/11

(52) U.S. Cl. CPC C12N 15/907; C12N 9/1276; C12N 9/22; C12N 15/11; C12Y 207/07049

(57) ABSTRACT

Provided herein are prime editing methods and compositions for treatment of genetic disorders such as myotonic dystrophy.

### CROSS REFERENCE TO RELATED APPLICATIONS

[0001] The present application claims priority to and the benefit of U.S. Provisional Application No. 63/229,768, filed Aug. 5, 2021, the contents of which are herein incorporated by reference in their entirety.

### BACKGROUND

[0002] The present invention describes dual prime editing as a genome editing approach for treating genetic diseases, for example, repeat expansion disorder myotonic dystrophy type 1 (DM1).

[0003] DM1 is an autosomal dominant neuromuscular disorder. Affected individuals display a wide range of symptoms including myotonia, skeletal muscle weakness and wasting, cardiac conduction abnormalities, and cataracts.

[0004] DM1 is associated with mutations in the DMPK gene. The DMPK gene encodes the myotonic dystrophy protein kinase (DMPK protein).

[0005] The 3′ untranslated region of the DMPK gene contains multiple copies of a CTG trinucleotide repeat. In most healthy individuals, the number of CTG repeats in the DMPK gene ranges from 5 to 34. Expansion of the CTG repeat numbers in the DMPK gene above a normal range results in increased number of repeats in the DMPK transcript, which can form stable double-stranded structures that have strong affinity for other functional proteins, e.g., proteins of the Muscleblind-like (MBNL) family, and prohibit the proteins from performing their normal functions. The expanded repeats can also result in abnormal splicing patterns in adult tissues, which can affect expression of hundreds of genes.

[0006] The severity of DM1 symptoms is correlated with the number of abnormally expanded CTG repeats in the DMPK gene. People with symptoms of DM1, including muscle weakness and wasting beginning in adulthood, usually have above 100 to 1000 CTG repeats. People born with more severe, congenital form of DM1 tend to have more than 1,000 CTG repeats in their cells. People with mild form of DM1 symptoms usually have between 50 and 150 CTG repeats in their cells. While smaller number of CTG repeats may only relate to mild symptoms or may be asymptomatic, as the altered DMPK gene is passed from one generation to the next, the size of the CTG repeat expansion may increases in size. For example, people with 35 to 49 CTG repeats do not develop DM symptoms, but their children may be at risk of having the disorder if the number of CTG repeats increases.

[0007] Current developments in treatment for DM1 include small molecules such as mexiletine and metformin and oligonucleotide based therapies such as siRNA and antisense nucleotides (ASOs).

[0008] This disclosure provides dual prime editing methods and compositions for editing the DMPK gene and removing pathogenic trinucleotide repeats associated with DM1.

### SUMMARY OF THE INVENTION

[0009] The prime editing systems described herein comprise compositions, systems, and methods that relate to programmable editing of a double stranded target DNA, e.g., a target gene such as a DMPK gene, using two or more prime editing guide RNAs (PEgRNAs) each complexed with a prime editor (“dual prime editing”). The compositions, systems, and methods described herein may be used to incorporate one or more intended nucleotide edits into the double stranded target DNA. In some embodiments, compositions, systems and methods relating to dual prime editing may be used to make alterations in a target sequence of a target gene, for example, a DMPK gene.

[0010] In some embodiments, dual prime editing incorporates one or more intended nucleotide edits into the target DNA through excision of an endogenous DNA segment and/or replacement of the endogenous DNA segment with newly synthesized DNA via target-primed DNA synthesis. Dual prime editing involves two different PEgRNAs each complexed with a prime editor. Without wishing to be bound by any particular theory, each of the two PEgRNAs comprises a region of complementarity to a distinct search target sequence of a target DNA, for example a DMPK gene, wherein the two distinct search target sequences are on the two complementary strands of the target DNA. In some embodiments, the two PEgRNAs each can direct a prime editor to initiate the prime editing process on the two complementary strands of the target DNA, thereby incorporating one or more intended nucleotide edits into the target DNA, e.g., the DMPK gene.

[0011] In one aspect, a prime editing composition of the present disclosure comprises: (A) a first prime editing guide RNA (PEgRNA) or one or more polynucleotides encoding the first PEgRNA, and (B) a second PEgRNA or one or more polynucleotides encoding the second PEgRNA; wherein the first PEgRNA comprises: (i) a first spacer that is complementary to a first search target sequence on a first strand of a DMPK gene; (ii) a first gRNA core capable of binding to a Cas9 protein; and (iii) a first extension arm comprising a first editing template and a first primer binding site (PBS); wherein the first spacer comprises at its 3′ end nucleotides 5-20 of a sequence selected from the group consisting of SEQ ID NOs: 1, 20, 39, 58, 77, 484, 518, 536, 554, 572, 590, 912, 929, 947, 965, 983, 1001, 1019, and 1341, and wherein the first PBS comprises at its 5′ end a sequence that is the reverse complement of nucleotides 15-17 of the selected sequence; wherein the second PEgRNA comprises: (i) a second spacer that is complementary to a second search target sequence on a second strand of the DMPK gene complementary to the first strand; (ii) a second gRNA core capable of binding to a Cas9 protein; and (iii) a second extension arm comprising a second editing template and a second PBS; wherein the second spacer comprises at its 3′ end nucleotides 5-20 of a sequence selected from the group consisting of SEQ ID NOs: 1359, 1381, 1403, 1503, 1525, 1864, 1882, 1900, 1918, 1936, 2263, 2281, 2299, 2317, 2335, 2353, 2673, and wherein the second PBS comprises at its 5′ end a sequence that is the reverse complement of nucleotides 15-17 of the selected sequence; and wherein (a) the first editing template comprises a region of complementarity to the second editing template; (b) the first editing template comprises nucleotides 8-17 of the selected sequence for the second spacer, and the second editing template comprises nucleotides 8-17 of the selected sequence for the first spacer; or (c) the first editing template comprises nucleotides 8-17 of the selected sequence for the second spacer, and a region of complementarity to the second editing template, and the second editing template comprises nucleotides 8-17 of the selected sequence for the first spacer, and a region of complementarity to the first editing template.

[0012] In some embodiments, the selected sequence for the first spacer is SEQ ID NOs: 77, 484, 536, 590, or 1019.

[0013] In some embodiments, the selected sequence for the second spacer is SEQ ID NO: 1525, 1900, 1936, 2263, 2281, 2299, 2353, or 2673.

[0014] In some embodiments, the selected sequence for the first spacer is SEQ ID NO: 77, 536, or 1019.

[0015] In some embodiments, the selected sequence for the second spacer is SEQ ID NO: 1900, 1936, or 2673.

[0016] In some embodiments, the first spacer and/or the second spacer is from 16 to 22 nucleotides in length.

[0017] In some embodiments, the first spacer and/or the second spacer comprises at its 3′ the selected sequence as described in any of the embodiments above.

[0018] In some embodiments, the first spacer and/or the second spacer is 20 nucleotides in length and comprises the selected sequence.

[0019] In some embodiments, the first gRNA core and the second gRNA core comprise the same sequence.

[0020] In some embodiments, the first gRNA core and the second gRNA core each comprises SEQ ID NO: 3641.

[0021] In some embodiments, the first spacer, the first gRNA core, the first editing template, and the first PBS form a contiguous sequence in a single molecule.

[0022] In some embodiments, the first PEgRNA comprises from 5′ to 3′ the first spacer, the first gRNA core, the first editing template, and the first PBS.

[0023] In some embodiments, the second spacer, the second gRNA core, the second editing template, and the second PBS form a contiguous sequence in a single molecule.

[0024] In some embodiments, the second pegRNA comprises from 5′ to 3′ the second spacer, the second gRNA core, the second editing template, and the second PBS.

[0025] In some embodiments, the first PBS is at least 8 nucleotides in length and comprises at its 5′ end a sequence that is the reverse complement of nucleotides 10-17 of the selected sequence for the first spacer.

[0026] In some embodiments, the first PBS is 8-17 nucleotides in length and comprises at its 5′ end a sequence that is the reverse complement of nucleotides 10-17, 9-17, 8-17, 7-17, 6-17, 5-17, 4-17, 3-17, 2-17, or 1-17 of the selected sequence for the first spacer. In some embodiments, the first PBS is 8-14 nucleotides in length. In some embodiments, the first PBS is 8-12 nucleotides in length. In some embodiments, the first PBS is 8-10 nucleotides in length. In some embodiments, the first PBS is 8-9 nucleotides in length. In some embodiments, the first PBS is 10 nucleotides in length. In some embodiments, the second PBS is at least 8 nucleotides in length and comprises at its 5′ end a sequence that is the reverse complement of nucleotides 10-17 of the selected sequence for the second spacer.

[0027] In some embodiments, the second PBS is 8-17 nucleotides in length and comprises at its 5′ end a sequence that is the reverse complement of nucleotides 10-17, 9-17, 8-17, 7-17, 6-17, 5-17, 4-17, 3-17, 2-17, or 1-17 of the selected sequence for the second spacer. In some embodiments, the second PBS is 8-14 nucleotides in length. In some embodiments, the second PBS is 8-12 nucleotides in length. In some embodiments, the second PBS is 8-10 nucleotides in length. In some embodiments, the second PBS is 8-9 nucleotides in length. In some embodiments, wherein the second PBS is 10 nucleotides in length.

[0028] In some embodiments, the prime editing composition comprises the first PEgRNA and the second PEgRNA as described in any of the embodiments above, wherein the first editing template comprises a region of complementarity to the second editing template. In some embodiments, the region of complementarity is about 20 to about 80 nucleotides in length. In some embodiments, the region of complementarity is about 20, about 21, about 22, about 23, about 24, about 25, about 26, about 27, about 28, about 29, about 30, about 31, about 32, about 33, about 34, about 35, about 36, about 37, about 38, about 39, about 40, about 41, about 42, about 43, about 44, about 45, about 46, about 47, about 48, about 49, about 50, about 51, about 52, about 53, about 54, about 55, about 56, about 57, about 58, about 59, about 60, about 61, about 62, about 63, about 64, about 65, about 66, about 67, about 68, about 69, about 70, about 71, about 72, about 73, about 74, about 75, about 76, about 77, about 78, about 79, or about 80 nucleotides in length. In some embodiments, the region of complementarity is between 20 and 80 nucleotides; between 21 and 80 nucleotides; between 22 and 80 nucleotides; between 23 and 80 nucleotides; between 24 and 80 nucleotides; between 25 and 80 nucleotides; between 26 and 80 nucleotides; between 27 and 80 nucleotides; between 28 and 80 nucleotides; between 29 and 80 nucleotides; between 30 and 80 nucleotides; between 31 and 80 nucleotides; between 32 and 80 nucleotides; between 33 and 80 nucleotides; between 34 and 80 nucleotides; between 35 and 80 nucleotides; between 36 and 80 nucleotides; between 37 and 80 nucleotides; between 38 and 80 nucleotides; between 39 and 80 nucleotides; between 40 and 80 nucleotides; between 41 and 80 nucleotides; between 42 and 80 nucleotides; between 43 and 80 nucleotides; between 44 and 80 nucleotides; between 45 and 80 nucleotides; between 46 and 80 nucleotides; between 47 and 80 nucleotides; between 48 and 80 nucleotides; between 49 and 80 nucleotides; between 50 and 80 nucleotides; between 51 and 80 nucleotides; between 52 and 80 nucleotides; between 53 and 80 nucleotides; between 54 and 80 nucleotides; between 55 and 80 nucleotides; between 56 and 80 nucleotides; between 57 and 80 nucleotides; between 58 and 80 nucleotides; between 59 and 80 nucleotides; between 60 and 80 nucleotides; between 61 and 80 nucleotides; between 62 and 80 nucleotides; between 63 and 80 nucleotides; between 64 and 80 nucleotides; between 65 and 80 nucleotides; between 66 and 80 nucleotides; between 67 and 80 nucleotides; between 68 and 80 nucleotides; between 69 and 80 nucleotides; between 70 and 80 nucleotides; between 71 and 80 nucleotides; between 72 and 80 nucleotides; between 73 and 80 nucleotides; between 74 and 80 nucleotides; between 75 and 80 nucleotides; between 76 and 80 nucleotides; between 77 and 80 nucleotides; between 78 and 80 nucleotides; between 20 and 80 nucleotides; between 20 and 79 nucleotides; between 20 and 78 nucleotides; between 20 and 77 nucleotides; between 20 and 76 nucleotides; between 20 and 75 nucleotides; between 20 and 74 nucleotides; between 20 and 73 nucleotides; between 20 and 72 nucleotides; between 20 and 71 nucleotides; between 20 and 70 nucleotides; between 20 and 69 nucleotides; between 20 and 68 nucleotides; between 20 and 67 nucleotides; between 20 and 66 nucleotides; between 20 and 65 nucleotides; between 20 and 64 nucleotides; between 20 and 63 nucleotides; between 20 and 62 nucleotides; between 20 and 61 nucleotides; between 20 and 60 nucleotides; between 20 and 59 nucleotides; between 20 and 58 nucleotides; between 20 and 57 nucleotides; between 20 and 56 nucleotides; between 20 and 55 nucleotides; between 20 and 54 nucleotides; between 20 and 53 nucleotides; between 20 and 52 nucleotides; between 20 and 51 nucleotides; between 20 and 50 nucleotides; between 20 and 49 nucleotides; between 20 and 48 nucleotides; between 20 and 47 nucleotides; between 20 and 46 nucleotides; between 20 and 45 nucleotides; between 20 and 44 nucleotides; between 20 and 43 nucleotides; between 20 and 42 nucleotides; between 20 and 41 nucleotides; between 20 and 40 nucleotides; between 20 and 39 nucleotides; between 20 and 38 nucleotides; between 20 and 37 nucleotides; between 20 and 36 nucleotides; between 20 and 35 nucleotides; between 20 and 34 nucleotides; between 20 and 33 nucleotides; between 20 and 32 nucleotides; between 20 and 31 nucleotides; between 20 and 30 nucleotides; between 20 and 29 nucleotides; between 20 and 28 nucleotides; between 20 and 27 nucleotides; between 20 and 26 nucleotides; between 20 and 25 nucleotides; between 20 and 24 nucleotides; between 20 and 23 nucleotides; or between 20 and 22 nucleotides in length. In some embodiments, the region of complementarity is at least 20, at least 21, at least 22, at least 23, at least 24, at least 25, at least 26, at least 27, at least 28, at least 29, at least 30, at least 31, at least 32, at least 33, at least 34, at least 35, at least 36, at least 37, at least 38, at least 39, at least 40, at least 41, at least 42, at least 43, at least 44, at least 45, at least 46, at least 47, at least 48, at least 49, at least 50, at least 51, at least 52, at least 53, at least 54, at least 55, at least 56, at least 57, at least 58, at least 59, at least 60, at least 61, at least 62, at least 63, at least 64, at least 65, at least 66, at least 67, at least 68, at least 69, at least 70, at least 71, at least 72, at least 73, at least 74, at least 75, at least 76, at least 77, at least 78, at least 79, or at least 80 nucleotides in length. In some embodiments, the region of complementarity that is no more than 20, no more than 21, no more than 22, no more than 23, no more than 24, no more than 25, no more than 26, no more than 27, no more than 28, no more than 29, no more than 30, no more than 31, no more than 32, no more than 33, no more than 34, no more than 35, no more than 36, no more than 37, no more than 38, no more than 39, no more than 40, no more than 41, no more than 42, no more than 43, no more than 44, no more than 45, no more than 46, no more than 47, no more than 48, no more than 49, no more than 50, no more than 51, no more than 52, no more than 53, no more than 54, no more than 55, no more than 56, no more than 57, no more than 58, no more than 59, no more than 60, no more than 61, no more than 62, no more than 63, no more than 64, no more than 65, no more than 66, no more than 67, no more than 68, no more than 69, no more than 70, no more than 71, no more than 72, no more than 73, no more than 74, no more than 75, no more than 76, no more than 77, no more than 78, no more than 79, or no more than 80 nucleotides in length.

[0029] In some embodiments, the region of complementarity is about 20 to about 40 nucleotides in length.

[0030] In some embodiments, the region of complementarity is 23-38 nucleotides in length.

[0031] In some embodiments, the region of complementarity is about 10-19 nucleotides in length.

[0032] In some embodiments, the region of complementarity is 10-19 nucleotides in length.

[0033] In some embodiments, the region of complementarity is about 20-29 nucleotides in length.

[0034] In some embodiments, the region of complementarity is 20-29 nucleotides in length.

[0035] In some embodiments, the region of complementarity is about 30-40 nucleotides in length.

[0036] In some embodiments, the region of complementarity is 30-40 nucleotides in length.

[0037] In some embodiments, the GC content of the region of complementarity is about 40% to about 80%.

[0038] In some embodiments, the GC content of the region of complementarity is about 50% to about 80%.

[0039] In some embodiments, the GC content of the region of complementarity is about 60% to about 80%.

[0040] In some embodiments, the GC content of the region of complementarity is at least 63%.

[0041] In some embodiments, the GC content of the region of complementarity is 63%-79%.

[0042] In some embodiments, the GC content of the region of complementarity is no more than about 45%.

[0043] In some embodiments, the GC content of the region of complementarity is no more than 45%.

[0044] In some embodiments, the GC content of the region of complementarity is about 45%-60%.

[0045] In some embodiments, the GC content of the region of complementarity is 45%-60%.

[0046] In some embodiments, the GC content of the region of complementarity is about 60%-75%.

[0047] In some embodiments, the GC content of the region of complementarity is 60%-75%.

[0048] In some embodiments, the GC content of the region of complementarity is at least about 75%.

[0049] In some embodiments, the GC content of the region of complementarity is at least 75%.

[0050] In some embodiments, the first editing template comprises SEQ ID NO: 2691.

[0051] In some embodiments, the second editing template comprises SEQ ID NO: 3075.

[0052] In some embodiments, in the first editing template comprises a sequence selected from the group consisting of SEQ ID NOs: 2692-2736.

[0053] In some embodiments, the second editing template comprises a sequence selected from the group consisting of SEQ ID NOs: 3076-3120.

[0054] In some embodiments, the first editing template comprises a sequence selected from the group consisting of SEQ ID NOs: 2692-2700.

[0055] In some embodiments, the second editing template comprises a sequence selected from the group consisting of SEQ ID NOs: 3076-3084.

[0056] In some embodiments, the first editing template comprises a sequence selected from the group consisting of SEQ ID NOs: 2701-2709.

[0057] In some embodiments, the second editing template comprises a sequence selected from the group consisting of SEQ ID NOs: 3085-3093.

[0058] In some embodiments, the first editing template comprises a sequence selected from the group consisting of SEQ ID NOs: 2710-2718.

[0059] In some embodiments, the second editing template comprises a sequence selected from the group consisting of SEQ ID NOs: 3094-3102.

[0060] In some embodiments, the first editing template comprises a sequence selected from the group consisting of SEQ ID NOs: 2719-2727.

[0061] In some embodiments, the second editing template comprises a sequence selected from the group consisting of SEQ ID NOs: 3103-3111.

[0062] In some embodiments, the first editing template comprises a sequence selected from the group consisting of SEQ ID NOs: 2728-2736.

[0063] In some embodiments, the second editing template comprises a sequence selected from the group consisting of SEQ ID NOs: 3112-3120.

[0064] In some embodiments, the first editing template comprises a sequence selected from the group consisting of SEQ ID NOs: 2737-2769.

[0065] In some embodiments, the second editing template comprises a sequence selected from the group consisting of SEQ ID NOs: 3121-3153.

[0066] In some embodiments, the first editing template comprises a sequence selected from the group consisting of SEQ ID NOs: 2737-2745 and 2769.

[0067] In some embodiments, the second editing template comprises a sequence selected from the group consisting of SEQ ID NOs: 3121-3129 and 3153.

[0068] In some embodiments, the first editing template comprises a sequence selected from the group consisting of SEQ ID NOs: 2746-2749.

[0069] In some embodiments, the second editing template comprises a sequence selected from the group consisting of SEQ ID NOs: 3130-3133.

[0070] In some embodiments, the first editing template comprises a sequence selected from the group consisting of SEQ ID NOs: 2750-2758.

[0071] In some embodiments, the second editing template comprises a sequence selected from the group consisting of SEQ ID NOs: 3134-3142.

[0072] In some embodiments, the first editing template comprises a sequence selected from the group consisting of SEQ ID NOs: 2759-2768.

[0073] In some embodiments, the second editing template comprises a sequence selected from the group consisting of SEQ ID NOs: 3143-3152.

[0074] In some embodiments, the first editing template comprises a sequence selected from the group consisting of SEQ ID NOs: 2770-3074.

[0075] In some embodiments, the second editing template comprises a sequence selected from the group consisting of SEQ ID NOs: 3154-3458.

[0076] In some embodiments, the region of complementarity is 10 to 19 nt in length and has a GC content of at least about 75%.

[0077] In some embodiments, the first editing template comprises SEQ ID NOs: 2796 or 2804.

[0078] In some embodiments, the second editing template comprises SEQ ID NO: 3180 or 3188.

[0079] In some embodiments, the first editing template comprises a sequence selected from the group consisting of SEQ ID NOs: 2895, 3008, 3011, 2847, 2859, and 2864.

[0080] In some embodiments, the second editing template comprises a sequence selected from the group consisting of SEQ ID NOs: 3279, 3392, 3395, 3231, 3243, and 3248.

[0081] In some embodiments, the region of complementarity is 10 to 19 nt in length and has a GC content of about 45%-60%.

[0082] In some embodiments, the first editing template comprises SEQ ID NOs: 2792 or 3014.

[0083] In some embodiments, the second editing template comprises SEQ ID NOs: 3176 or 3398:

[0084] In some embodiments, first editing template comprises a sequence selected from the group consisting of SEQ ID NOs: 2819, 2786, and 2835.

[0085] In some embodiments, the second editing template comprises a sequence selected from the group consisting of SEQ ID NOs: 3203, 3170, and 3219.

[0086] In some embodiments, the region of complementarity is 10 to 19 nt in length and has a GC content of less than about 45%.

[0087] In some embodiments, the first editing template comprises SEQ ID NO: 2770 or 2803.

[0088] In some embodiments, the second editing template comprises SEQ ID NO: 3154 or 3187.

[0089] In some embodiments, the first editing template comprises a sequence selected from the group consisting of SEQ ID NOs: 2812, 2929, and 2797.

[0090] In some embodiments, the second editing template comprises a sequence selected from the group consisting of SEQ ID NOs: 3196, 3313, and 3181.

[0091] In some embodiments, the region of complementarity is 10 to 19 nt in length and has a GC content of about 60%-75%.

[0092] In some embodiments, the first editing template comprises SEQ ID NOs: 2781 or 2977.

[0093] In some embodiments, the second editing template comprises a SEQ ID NOs: 3165 or 3361.

[0094] In some embodiments, the first editing template comprises a sequence selected from the group consisting of SEQ ID NOs: 2802, 2823, 2939, 2831, and 2909.

[0095] In some embodiments, the second editing template comprises a sequence selected from the group consisting of SEQ ID NOs: 3186, 3207, 3323, 3215, and 3293.

[0096] In some embodiments, the region of complementarity is 20-30 nt in length and has a GC content of at least about 75%.

[0097] In some embodiments, n the first editing template comprises SEQ ID NO: 2851

[0098] In some embodiments, the second editing template comprises SEQ ID NO: 3235.

[0099] In some embodiments, the region of complementarity is 20-30 nt in length and has a GC content of about 45%-60%.

[0100] In some embodiments, the first editing template comprises SEQ ID NOs: 2924 or 3066.

[0101] In some embodiments, the second editing template comprises SEQ ID NOs: 3308 or 3450.

[0102] In some embodiments, first editing template comprises a sequence selected from the group consisting of SEQ ID NOs: 2925, 2995, 2950, and 2978.

[0103] In some embodiments, the second editing template comprises a sequence selected from the group consisting of SEQ ID NOs: 3309, 3379, 3334, and 3362.

[0104] In some embodiments, the region of complementarity is 20 to 30 nt in length and has a GC content of less than about 45%.

[0105] In some embodiments, first editing template comprises SEQ ID NOs: 2777 or 3032.

[0106] In some embodiments, the second editing template comprises SEQ ID NO:3161 or 3416.

[0107] In some embodiments, the first editing template comprises a sequence selected from the group consisting of SEQ ID NOs: 3040, 3072, and 2773.

[0108] In some embodiments, the second editing template comprises a sequence selected from the group consisting of SEQ ID NOs: 3424, 3456, and 3157.

[0109] In some embodiments, the region of complementarity is 20 to 30 nt in length and has a GC content of about 60%-75%.

[0110] In some embodiments, the first editing template comprises SEQ ID No 2980 or 3039.

[0111] In some embodiments, the second editing template comprises a sequence selected from the group consisting of SEQ ID NOs: 3364 or 3423.

[0112] In some embodiments, the first editing template comprises SEQ ID NOs: 2997 or 2849.

[0113] In some embodiments, the second editing template SEQ ID NOs: 3381, or 3233.

[0114] In some embodiments, the region of complementarity is at least 30 nt in length and has a GC content of about 45%-60%, optionally wherein the region of complementarity is 30 to 40 nt in length.

[0115] In some embodiments, the first editing template comprises SEQ ID NO: 3013.

[0116] In some embodiments, the second editing template comprises a sequence selected from the group consisting of SEQ ID NO: 3397.

[0117] In some embodiments, the first editing template comprises SEQ ID NO: 2820 or 2976.

[0118] In some embodiments, the second editing template comprises SEQ ID NO: 3204 or 3360.

[0119] In some embodiments, the region of complementarity is at least 30 nt in length and has a GC content of less than about 45%, optionally wherein the region of complementarity is 30 to 40 nt in length.

[0120] In some embodiments, the first editing template comprises SEQ ID NO: 2943 or 3020.

[0121] In some embodiments, the second editing template comprises a sequence selected from the group consisting of SEQ ID NOs: 3327 or 3404.

[0122] In some embodiments, the first editing template comprises SEQ ID NO: 2778 or 3061.

[0123] In some embodiments, the second editing template comprises SEQ ID NOs: 3162 or 3445.

[0124] In some embodiments, the prime editing composition of the above described embodiments comprises the first PEgRNA and the second PEgRNA, wherein: (i) the first spacer comprises SEQ ID NO: 77, and the first PBS comprises SEQ ID No: 85; (ii) the first spacer comprises SEQ ID NO: 536, and the first PBS comprises SEQ ID No: 544; or (iii) the first spacer comprises SEQ ID NO: 1019, and the first PBS comprises SEQ ID No:1027; and wherein: (i) the second spacer comprises SEQ ID NO: 1900, and the second PBS comprises SEQ ID NO: 1908; (ii) the second spacer comprises SEQ ID NO: 1936, and the second PBS comprises SEQ ID NO: 1944; or (iii) the second spacer comprises SEQ ID NO: 2673, and the second PBS comprises SEQ ID NO: 2681.

[0125] In some embodiments, the first spacer comprises SEQ ID No: 77, and the first PBS is 8-10 nucleotides in length and comprises SEQ ID NOs: 87, 86, or 85.

[0126] In some embodiments, the second spacer comprises SEQ ID NO: 1936, and the second PBS is 8-10 nucleotides in length and comprises SEQ ID NOs: 1946, 1945, or 1944.

[0127] In some embodiments, the first PEgRNA comprises a sequence selected from the group consisting of SEQ ID NOs: 93-102, 552, 553, 1035, and 1036, and wherein the second PEgRNA comprises a sequence selected from the group consisting of SEQ ID NOs: 1952-1961, 1916, 1917, 2689, and 2690.

[0128] In some embodiments, the first PEgRNA comprises a sequence selected from the group consisting of SEQ ID NOs: 94, 552, and 1035; and wherein the second PEgRNA comprises a sequence selected from the group consisting of 1952, 1916, and 2689.

[0129] In some embodiments, the first editing template and the second editing template have the same length and are perfectly complementary to each other.

[0130] In some embodiments, the first spacer comprises at its 3′ end nucleotides 5-20 of SEQ ID NO: 77, and wherein the first editing template comprises a sequence selected from the group consisting of SEQ ID NOs: 2771, 2800, 2811, 2775, 2778, 2820, 2990, 2776, 2779, 2780, 2786, 2799, 2802, 2812, 2819, 2937, 2996, 3010, 3041, 3044, 3058, 2813, 3068, 3070, and 3072.

[0131] In some embodiments, the first spacer comprises at its 3′ end nucleotides 5-20 of SEQ ID NO: 1019, and wherein the first editing template comprises a sequence selected from the group consisting of SEQ ID NOs: 2795, 2949, 2816, 2775, 2778, 2820, 2990, 2776, 2779, 2780, 2786, 2799, 2802, 2812, 2819, 2937, 2996, 3010, 3041, 2813, 3068, 3070, and 3072.

[0132] In some embodiments, the first spacer comprises at its 3′ end nucleotides 5-20 of SEQ ID NO: 590, and wherein the first editing template comprises a sequence selected from the group consisting of SEQ ID NOs: 2774, 2834, 2896, 2940, 2962, 3009, 30302816, 2776, 2779, 2780, 2786, 2799, 2802, 2812, 2819, 2937, 2996, 3010, 3041, 3044, 3058, and 3072.

[0133] In some embodiments, the second spacer comprises at its 3′ end nucleotides 5-20 of SEQ ID NO: 1525, and wherein the second editing template comprises a sequence selected from the group consisting of SEQ ID NOs: 3195, 3158, 3414, 3393, 3162, 3204, 3164, 3170, 3203, 3380, 3425, 3442, 3197, 3454, 3159, 3186, 3196, 3456, 3280, 3160, and 3163.

[0134] In some embodiments, the second spacer comprises at its 3′ end nucleotides 5-20 of SEQ ID NO: 1936, and wherein the second editing template comprises a sequence selected from the group consisting of SEQ ID NOs: 3184, 3218, 3346, 3321, 3428, 3452, 3393, 3162, 3204, 3164, 3170, 3203, 3380, 3425, 3442, 3197, 3454, 3159, 3186, 3196, and 3456.

[0135] In some embodiments, the second spacer comprises at its 3′ end nucleotides 5-20 of SEQ ID NO: 2353, and wherein the second editing template comprises a sequence selected from the group consisting of SEQ ID NOs: 3155, 3324, 3179, 3333, 3200, 3374, 3183, 3394, 3452, 3393, 3162, 3204, 3164, 3170, 3203, 3380, 3425, 3442, 3197, 3454, 3280, 3160, and 3163.

[0136] In some embodiments, the first editing template and the second editing template have the same length and are perfectly complementary to each other.

[0137] In some embodiments, the prime editing composition comprises the first PEgRNA and the second PEgRNa, wherein the first editing template comprises at its 3′ end nucleotides 8-17 of the selected sequence for the second spacer, and wherein the second editing template comprises at its 3′ end nucleotides 8-17 of the selected sequence of the first spacer.

[0138] In some embodiments, the first editing template comprises at its 3′ end nucleotides 1-17, 2-17, 3-17, 4-17, 5-17, 6-17, 7-17, or 8-17 of the selected sequence for the second spacer, and/or wherein the second editing template comprises at its 3′ end nucleotides 1-17, 2-17, 3-17, 4-17, 5-17, 6-17, 7-17, or 8-17 of the selected sequence for the first spacer.

[0139] In some embodiments, the first editing template comprises at its 3′ end nucleotides 3-17 of the selected sequence for the second spacer, and wherein the second editing template comprises at its 3′ end nucleotides 3-17 of the selected sequence of the first spacer.

[0140] In some embodiments, the first editing template comprises a region of complementarity to a sequence on the second strand of the DMPK gene that is directly 3′ to nucleotide 3 of the second search target sequence, wherein the region of complementarity is about 20, about 25, about 30 about 35, about 40, about 45, about 50 nucleotides in length.

[0141] In some embodiments, a prime editing composition comprises a first PEgRNA comprising a first editing template that comprises a region of complementarity to a sequence on the second strand of the DMPK gene that is directly 3′ to nucleotide 3 of the second search target sequence, wherein the region of complementarity is about 20, about 21, about 22, about 23, about 24, about 25, about 26, about 27, about 28, about 29, about 30, about 31, about 32, about 33, about 34, about 35, about 36, about 37, about 38, about 39, about 40, about 41, about 42, about 43, about 44, about 45, about 46, about 47, about 48, about 49, or about 50 nucleotides in length.

[0142] In some embodiments, a prime editing composition of comprises a first PEgRNA comprising a first editing template that comprises a region of complementarity to a sequence on the second strand of the DMPK gene that is directly 3′ to nucleotide 3 of the second search target sequence, wherein the region of complementarity is between 20 and 50 nucleotides; between 21 and 50 nucleotides; between 22 and 50 nucleotides; between 23 and 50 nucleotides; between 24 and 50 nucleotides; between 25 and 50 nucleotides; between 26 and 50 nucleotides; between 27 and 50 nucleotides; between 28 and 50 nucleotides; between 29 and 50 nucleotides; between 30 and 50 nucleotides; between 31 and 50 nucleotides; between 32 and 50 nucleotides; between 33 and 50 nucleotides; between 34 and 50 nucleotides; between 35 and 50 nucleotides; between 36 and 50 nucleotides; between 37 and 50 nucleotides; between 38 and 50 nucleotides; between 39 and 50 nucleotides; between 40 and 50 nucleotides; between 41 and 50 nucleotides; between 42 and 50 nucleotides; between 43 and 50 nucleotides; between 44 and 50 nucleotides; between 45 and 50 nucleotides; between 46 and 50 nucleotides; between 47 and 50 nucleotides; between 48 and 50 nucleotides; between 20 and 50 nucleotides; between 20 and 49 nucleotides; between 20 and 48 nucleotides; between 20 and 47 nucleotides; between 20 and 46 nucleotides; between 20 and 45 nucleotides; between 20 and 44 nucleotides; between 20 and 43 nucleotides; between 20 and 42 nucleotides; between 20 and 41 nucleotides; between 20 and 40 nucleotides; between 20 and 39 nucleotides; between 20 and 38 nucleotides; between 20 and 37 nucleotides; between 20 and 36 nucleotides; between 20 and 35 nucleotides; between 20 and 34 nucleotides; between 20 and 33 nucleotides; between 20 and 32 nucleotides; between 20 and 31 nucleotides; between 20 and 30 nucleotides; between 20 and 29 nucleotides; between 20 and 28 nucleotides; between 20 and 27 nucleotides; between 20 and 26 nucleotides; between 20 and 25 nucleotides; between 20 and 24 nucleotides; between 20 and 23 nucleotides; or between 20 and 22 nucleotides in length.

[0143] In some embodiments, a prime editing composition of a first PEgRNA that comprises a first editing template that comprises a region of complementarity to a sequence on the second strand of the DMPK gene that is directly 3′ to nucleotide 3 of the second search target sequence, wherein the region of complementarity is at least 20, at least 21, at least 22, at least 23, at least 24, at least 25, at least 26, at least 27, at least 28, at least 29, at least 30, at least 31, at least 32, at least 33, at least 34, at least 35, at least 36, at least 37, at least 38, at least 39, at least 40, at least 41, at least 42, at least 43, at least 44, at least 45, at least 46, at least 47, at least 48, at least 49, or at least 50 nucleotides in length.

[0144] In some embodiments, a prime editing composition of comprises a first PEgRNA that comprises a first editing template that comprises a region of complementarity to a sequence on the second strand of the DMPK gene that is directly 3′ to nucleotide 3 of the second search target sequence, wherein the region of complementarity is no more than 20, no more than 21, no more than 22, no more than 23, no more than 24, no more than 25, no more than 26, no more than 27, no more than 28, no more than 29, no more than 30, no more than 31, no more than 32, no more than 33, no more than 34, no more than 35, no more than 36, no more than 37, no more than 38, no more than 39, no more than 40, no more than 41, no more than 42, no more than 43, no more than 44, no more than 45, no more than 46, no more than 47, no more than 48, no more than 49, or no more than 50 nucleotides in length.

[0145] In some embodiments, the region of complementarity is about 20-30 nucleotides in length.

[0146] In some embodiments, the second editing template comprises a region of complementarity to a sequence on the first strand of the DMPK gene that is directly 3′ to nucleotide 3 of the first search target sequence, wherein the region of complementarity is about 20, about 25, about 30, about 35, about 40, about 45, or about 50 nucleotides in length.

[0147] In some embodiments, the region of complementarity is about 20-30 nucleotides in length.

[0148] In some embodiments, the first editing template comprises a sequence selected from the group consisting of SEQ ID NOs: 3459-3461, wherein the second spacer comprises at its 3′ end nucleotides 5-20 of SEQ ID NO: 1525, optionally wherein the second spacer comprises at its 3 end SEQ ID NO: 1525.

[0149] In some embodiments, the first editing template comprises a sequence selected from the group consisting of SEQ ID NOs: 3467-3471, wherein the second spacer comprises at its 3′ end nucleotides 5-20 of SEQ ID NO: 1525, optionally wherein the second spacer comprises at its 3 end SEQ ID NO: 1525.

[0150] In some embodiments, the first editing template comprises a sequence selected from the group consisting of SEQ ID NOs: 3462-3466, and wherein the second spacer comprises at its 3′ end nucleotides 5-20 of SEQ ID NO: 2353, optionally wherein the second spacer comprises at its 3 end SEQ ID NO: 2353.

[0151] In some embodiments, the first editing template comprises a sequence selected from the group consisting of SEQ ID NOs: 3472-3476, wherein the second spacer comprises at its 3′ end nucleotides 5-20 of SEQ ID NO: 1936, optionally wherein the second spacer comprises at its 3 end SEQ ID NO: 1936.

[0152] In some embodiments, the first editing template comprises nucleotides 31-40, 30-40, 29-40, 28-40, 27-40, 26-40, 25-40, 24-40, 23-40, 22-40, 21-40, 20-40, 19-40, 18-40, 17-40, 16-40, 15-40, 14-40, 13-40, 12-40, 11-40, 10-40, 9-40, 8-40, 7-40, 6-40, 5-40, 4-40, 3-40, 2-40, or 1-40 of SEQ ID NO: 3647, wherein the second spacer comprises at its 3′ end nucleotides 5-20 of SEQ ID NO:1900, optionally wherein the second spacer comprises at its 3′ end SEQ ID NO: 1900.

[0153] In some embodiments, the first editing template comprises nucleotides 31-40, 30-40, 29-40, 28-40, 27-40, 26-40, 25-40, 24-40, 23-40, 22-40, 21-40, 20-40, 19-40, 18-40, 17-40, 16-40, 15-40, 14-40, 13-40, 12-40, 11-40, 10-40, 9-40, 8-40, 7-40, 6-40, 5-40, 4-40, 3-40, 2-40, or 1-40 of SEQ ID NO: 3648, wherein the second spacer comprises at its 3′ end nucleotides 5-20 of SEQ ID NO: 1918, optionally wherein the second spacer comprises at its 3′ end SEQ ID NO: 1918.

[0154] In some embodiments, the first editing template comprises nucleotides 31-40, 30-40, 29-40, 28-40, 27-40, 26-40, 25-40, 24-40, 23-40, 22-40, 21-40, 20-40, 19-40, 18-40, 17-40, 16-40, 15-40, 14-40, 13-40, 12-40, 11-40, 10-40, 9-40, 8-40, 7-40, 6-40, 5-40, 4-40, 3-40, 2-40, or 1-40 of SEQ ID NO: 3649, wherein the second spacer comprises at its 3′ end nucleotides 5-20 of SEQ ID NO: 1403, optionally wherein the second spacer comprises at its 3′ end SEQ ID NO: 1403.

[0155] In some embodiments, the first editing template comprises nucleotides 31-40, 30-40, 29-40, 28-40, 27-40, 26-40, 25-40, 24-40, 23-40, 22-40, 21-40, 20-40, 19-40, 18-40, 17-40, 16-40, 15-40, 14-40, 13-40, 12-40, 11-40, 10-40, 9-40, 8-40, 7-40, 6-40, 5-40, 4-40, 3-40, 2-40, or 1-40 of SEQ ID NO: 3650, wherein the second spacer comprises at its 3′ end nucleotides 5-20 of SEQ ID NO: 1936, optionally wherein the second spacer comprises at its 3′ end SEQ ID NO: 1936.

[0156] In some embodiments, the first editing template comprises nucleotides 31-40, 30-40, 29-40, 28-40, 27-40, 26-40, 25-40, 24-40, 23-40, 22-40, 21-40, 20-40, 19-40, 18-40, 17-40, 16-40, 15-40, 14-40, 13-40, 12-40, 11-40, 10-40, 9-40, 8-40, 7-40, 6-40, 5-40, 4-40, 3-40, 2-40, or 1-40 of SEQ ID NO: 3651, wherein the second spacer comprises at its 3′ end nucleotides 5-20 of SEQ ID NO: 2263, optionally wherein the second spacer comprises at its 3′ end SEQ ID NO: 2263.

[0157] In some embodiments, the first editing template comprises nucleotides 31-40, 30-40, 29-40, 28-40, 27-40, 26-40, 25-40, 24-40, 23-40, 22-40, 21-40, 20-40, 19-40, 18-40, 17-40, 16-40, 15-40, 14-40, 13-40, 12-40, 11-40, 10-40, 9-40, 8-40, 7-40, 6-40, 5-40, 4-40, 3-40, 2-40, or 1-40 of SEQ ID NO: 3652, wherein the second spacer comprises at its 3′ end nucleotides 5-20 of SEQ ID NO: 2353, optionally wherein the second spacer comprises at its 3′ end SEQ ID NO: 2353.

[0158] In some embodiments, the first editing template comprises nucleotides 31-40, 30-40, 29-40, 28-40, 27-40, 26-40, 25-40, 24-40, 23-40, 22-40, 21-40, 20-40, 19-40, 18-40, 17-40, 16-40, 15-40, 14-40, 13-40, 12-40, 11-40, 10-40, 9-40, 8-40, 7-40, 6-40, 5-40, 4-40, 3-40, 2-40, or 1-40 of SEQ ID NO: 3653, wherein the second spacer comprises at its 3′ end nucleotides 5-20 of SEQ ID NO: 1503, optionally wherein the second spacer comprises at its 3′ end SEQ ID NO: 1503.

[0159] In some embodiments, the first editing template comprises nucleotides 31-40, 30-40, 29-40, 28-40, 27-40, 26-40, 25-40, 24-40, 23-40, 22-40, 21-40, 20-40, 19-40, 18-40, 17-40, 16-40, 15-40, 14-40, 13-40, 12-40, 11-40, 10-40, 9-40, 8-40, 7-40, 6-40, 5-40, 4-40, 3-40, 2-40, or 1-40 of SEQ ID NO: 3654, wherein the second spacer comprises at its 3′ end nucleotides 5-20 of SEQ ID NO: 2281, optionally wherein the second spacer comprises at its 3′ end SEQ ID NO: 2281.

[0160] In some embodiments, the first editing template comprises nucleotides 31-40, 30-40, 29-40, 28-40, 27-40, 26-40, 25-40, 24-40, 23-40, 22-40, 21-40, 20-40, 19-40, 18-40, 17-40, 16-40, 15-40, 14-40, 13-40, 12-40, 11-40, 10-40, 9-40, 8-40, 7-40, 6-40, 5-40, 4-40, 3-40, 2-40, or 1-40 of SEQ ID NO: 3655, wherein the second spacer comprises at its 3′ end nucleotides 5-20 of SEQ ID NO: 2673, optionally wherein the second spacer comprises at its 3′ end SEQ ID NO: 2673.

[0161] In some embodiments, the first editing template comprises nucleotides 31-40, 30-40, 29-40, 28-40, 27-40, 26-40, 25-40, 24-40, 23-40, 22-40, 21-40, 20-40, 19-40, 18-40, 17-40, 16-40, 15-40, 14-40, 13-40, 12-40, 11-40, 10-40, 9-40, 8-40, 7-40, 6-40, 5-40, 4-40, 3-40, 2-40, or 1-40 of SEQ ID NO: 3656, wherein the second spacer comprises at its 3′ end nucleotides 5-20 of SEQ ID NO: 1525, optionally wherein the second spacer comprises at its 3′ end SEQ ID NO: 1525.

[0162] In some embodiments, the first editing template comprises nucleotides 31-40, 30-40, 29-40, 28-40, 27-40, 26-40, 25-40, 24-40, 23-40, 22-40, 21-40, 20-40, 19-40, 18-40, 17-40, 16-40, 15-40, 14-40, 13-40, 12-40, 11-40, 10-40, 9-40, 8-40, 7-40, 6-40, 5-40, 4-40, 3-40, 2-40, or 1-40 of SEQ ID NO: 3657, wherein the second spacer comprises at its 3′ end nucleotides 5-20 of SEQ ID NO: 2299, optionally wherein the second spacer comprises at its 3′ end SEQ ID NO: 2299.

[0163] In some embodiments, the first editing template comprises nucleotides 31-40, 30-40, 29-40, 28-40, 27-40, 26-40, 25-40, 24-40, 23-40, 22-40, 21-40, 20-40, 19-40, 18-40, 17-40, 16-40, 15-40, 14-40, 13-40, 12-40, 11-40, 10-40, 9-40, 8-40, 7-40, 6-40, 5-40, 4-40, 3-40, 2-40, or 1-40 of SEQ ID NO: 3658, wherein the second spacer comprises at its 3′ end nucleotides 5-20 of SEQ ID NO: 2317, optionally wherein the second spacer comprises at its 3′ end SEQ ID NO: 2317.

[0164] In some embodiments, the first editing template comprises nucleotides 31-40, 30-40, 29-40, 28-40, 27-40, 26-40, 25-40, 24-40, 23-40, 22-40, 21-40, 20-40, 19-40, 18-40, 17-40, 16-40, 15-40, 14-40, 13-40, 12-40, 11-40, 10-40, 9-40, 8-40, 7-40, 6-40, 5-40, 4-40, 3-40, 2-40, or 1-40 of SEQ ID NO: 3659, wherein the second spacer comprises at its 3′ end nucleotides 5-20 of SEQ ID NO: 1864, optionally wherein the second spacer comprises at its 3′ end SEQ ID NO: 1864.

[0165] In some embodiments, the first editing template comprises nucleotides 31-40, 30-40, 29-40, 28-40, 27-40, 26-40, 25-40, 24-40, 23-40, 22-40, 21-40, 20-40, 19-40, 18-40, 17-40, 16-40, 15-40, 14-40, 13-40, 12-40, 11-40, 10-40, 9-40, 8-40, 7-40, 6-40, 5-40, 4-40, 3-40, 2-40, or 1-40 of SEQ ID NO: 3660, wherein the second spacer comprises at its 3′ end nucleotides 5-20 of SEQ ID NO: 1359, optionally wherein the second spacer comprises at its 3′ end SEQ ID NO: 1359.

[0166] In some embodiments, the first editing template comprises nucleotides 31-40, 30-40, 29-40, 28-40, 27-40, 26-40, 25-40, 24-40, 23-40, 22-40, 21-40, 20-40, 19-40, 18-40, 17-40, 16-40, 15-40, 14-40, 13-40, 12-40, 11-40, 10-40, 9-40, 8-40, 7-40, 6-40, 5-40, 4-40, 3-40, 2-40, or 1-40 of SEQ ID NO: 3661, wherein the second spacer comprises at its 3′ end nucleotides 5-20 of SEQ ID NO: 2335, optionally wherein the second spacer comprises at its 3′ end SEQ ID NO: 2335.

[0167] In some embodiments, the first editing template comprises nucleotides 31-40, 30-40, 29-40, 28-40, 27-40, 26-40, 25-40, 24-40, 23-40, 22-40, 21-40, 20-40, 19-40, 18-40, 17-40, 16-40, 15-40, 14-40, 13-40, 12-40, 11-40, 10-40, 9-40, 8-40, 7-40, 6-40, 5-40, 4-40, 3-40, 2-40, or 1-40 of SEQ ID NO: 3662, wherein the second spacer comprises at its 3′ end nucleotides 5-20 of SEQ ID NO: 1882, optionally wherein the second spacer comprises at its 3′ end SEQ ID NO: 1882.

[0168] In some embodiments, the first editing template comprises nucleotides 31-40, 30-40, 29-40, 28-40, 27-40, 26-40, 25-40, 24-40, 23-40, 22-40, 21-40, 20-40, 19-40, 18-40, 17-40, 16-40, 15-40, 14-40, 13-40, 12-40, 11-40, 10-40, 9-40, 8-40, 7-40, 6-40, 5-40, 4-40, 3-40, 2-40, or 1-40 of SEQ ID NO: 3663, wherein the second spacer comprises at its 3′ end nucleotides 5-20 of SEQ ID NO: 1381, optionally wherein the second spacer comprises at its 3′ end SEQ ID NO: 1381.

[0169] In some embodiments, the second editing template comprises a sequence selected from the group consisting of SEQ ID NOs: 3477-3479, wherein the first spacer comprises at its 3′ end nucleotides 5-20 of SEQ ID NO: 484, optionally wherein the first spacer comprises at its 3′ end SEQ ID NO: 484.

[0170] In some embodiments, the second editing template comprises a sequence selected from the group consisting of SEQ ID NOs: 3480-3484, wherein the first spacer comprises at its 3′ end nucleotides 5-20 of SEQ ID NO: 77, optionally wherein the first spacer comprises at its 3 end SEQ ID NO: 77.

[0171] In some embodiments, the second editing template comprises a sequence selected from the group consisting of SEQ ID NOs: 3485-3489, wherein the first spacer comprises at its 3′ end nucleotides 5-20 of SEQ ID NO: 590, optionally wherein the first spacer comprises at its 3 end SEQ ID NO: 590.

[0172] In some embodiments, the second editing template comprises a sequence selected from the group consisting of SEQ ID NOs: 3490-3494, wherein the first spacer comprises at its 3′ end nucleotides 5-20 of SEQ ID NO: 1019, optionally wherein the first spacer comprises at its 3 end SEQ ID NO: 1019.

[0173] In some embodiments, the second editing template comprises nucleotides 31-40, 30-40, 29-40, 28-40, 27-40, 26-40, 25-40, 24-40, 23-40, 22-40, 21-40, 20-40, 19-40, 18-40, 17-40, 16-40, 15-40, 14-40, 13-40, 12-40, 11-40, 10-40, 9-40, 8-40, 7-40, 6-40, 5-40, 4-40, 3-40, 2-40, or 1-40 of SEQ ID NO: 3664, wherein the second spacer comprises at its 3′ end nucleotides 5-20 of SEQ ID NO:518, optionally wherein the second spacer comprises at its 3′ end SEQ ID NO:518.

[0174] In some embodiments, the second editing template comprises nucleotides 31-40, 30-40, 29-40, 28-40, 27-40, 26-40, 25-40, 24-40, 23-40, 22-40, 21-40, 20-40, 19-40, 18-40, 17-40, 16-40, 15-40, 14-40, 13-40, 12-40, 11-40, 10-40, 9-40, 8-40, 7-40, 6-40, 5-40, 4-40, 3-40, 2-40, or 1-40 of SEQ ID NO:3665, wherein the second spacer comprises at its 3′ end nucleotides 5-20 of SEQ ID NO:536, optionally wherein the second spacer comprises at its 3′ end SEQ ID NO:536.

[0175] Embodiment 58f: The prime editing composition of any one of Embodiments 50-58, wherein the second editing template comprises nucleotides 31-40, 30-40, 29-40, 28-40, 27-40, 26-40, 25-40, 24-40, 23-40, 22-40, 21-40, 20-40, 19-40, 18-40, 17-40, 16-40, 15-40, 14-40, 13-40, 12-40, 11-40, 10-40, 9-40, 8-40, 7-40, 6-40, 5-40, 4-40, 3-40, 2-40, or 1-40 of SEQ ID NO:3666, wherein the second spacer comprises at its 3′ end nucleotides 5-20 of SEQ ID NO:554, optionally wherein the second spacer comprises at its 3′ end SEQ ID NO:554.

[0176] In some embodiments, the second editing template comprises nucleotides 31-40, 30-40, 29-40, 28-40, 27-40, 26-40, 25-40, 24-40, 23-40, 22-40, 21-40, 20-40, 19-40, 18-40, 17-40, 16-40, 15-40, 14-40, 13-40, 12-40, 11-40, 10-40, 9-40, 8-40, 7-40, 6-40, 5-40, 4-40, 3-40, 2-40, or 1-40 of SEQ ID NO:3667, wherein the second spacer comprises at its 3′ end nucleotides 5-20 of SEQ ID NO:572, optionally wherein the second spacer comprises at its 3′ end SEQ ID NO:572.

[0177] In some embodiments, the second editing template comprises nucleotides 31-40, 30-40, 29-40, 28-40, 27-40, 26-40, 25-40, 24-40, 23-40, 22-40, 21-40, 20-40, 19-40, 18-40, 17-40, 16-40, 15-40, 14-40, 13-40, 12-40, 11-40, 10-40, 9-40, 8-40, 7-40, 6-40, 5-40, 4-40, 3-40, 2-40, or 1-40 of SEQ ID NO:3668, wherein the second spacer comprises at its 3′ end nucleotides 5-20 of SEQ ID NO:590, optionally wherein the second spacer comprises at its 3′ end SEQ ID NO:590.

[0178] In some embodiments, the second editing template comprises nucleotides 31-40, 30-40, 29-40, 28-40, 27-40, 26-40, 25-40, 24-40, 23-40, 22-40, 21-40, 20-40, 19-40, 18-40, 17-40, 16-40, 15-40, 14-40, 13-40, 12-40, 11-40, 10-40, 9-40, 8-40, 7-40, 6-40, 5-40, 4-40, 3-40, 2-40, or 1-40 of SEQ ID NO:3669, wherein the second spacer comprises at its 3′ end nucleotides 5-20 of SEQ ID NO:39, optionally wherein the second spacer comprises at its 3′ end SEQ ID NO:39.

[0179] In some embodiments, the second editing template comprises nucleotides 31-40, 30-40, 29-40, 28-40, 27-40, 26-40, 25-40, 24-40, 23-40, 22-40, 21-40, 20-40, 19-40, 18-40, 17-40, 16-40, 15-40, 14-40, 13-40, 12-40, 11-40, 10-40, 9-40, 8-40, 7-40, 6-40, 5-40, 4-40, 3-40, 2-40, or 1-40 of SEQ ID NO:3670, wherein the second spacer comprises at its 3′ end nucleotides 5-20 of SEQ ID NO:912, optionally wherein the second spacer comprises at its 3′ end SEQ ID NO:912.

[0180] In some embodiments, the second editing template comprises nucleotides 31-40, 30-40, 29-40, 28-40, 27-40, 26-40, 25-40, 24-40, 23-40, 22-40, 21-40, 20-40, 19-40, 18-40, 17-40, 16-40, 15-40, 14-40, 13-40, 12-40, 11-40, 10-40, 9-40, 8-40, 7-40, 6-40, 5-40, 4-40, 3-40, 2-40, or 1-40 of SEQ ID NO:3671, wherein the second spacer comprises at its 3′ end nucleotides 5-20 of SEQ ID NO:929, optionally wherein the second spacer comprises at its 3′ end SEQ ID NO:929.

[0181] In some embodiments, the second editing template comprises nucleotides 31-40, 30-40, 29-40, 28-40, 27-40, 26-40, 25-40, 24-40, 23-40, 22-40, 21-40, 20-40, 19-40, 18-40, 17-40, 16-40, 15-40, 14-40, 13-40, 12-40, 11-40, 10-40, 9-40, 8-40, 7-40, 6-40, 5-40, 4-40, 3-40, 2-40, or 1-40 of SEQ ID NO:3672, wherein the second spacer comprises at its 3′ end nucleotides 5-20 of SEQ ID NO:947, optionally wherein the second spacer comprises at its 3′ end SEQ ID NO:947.

[0182] In some embodiments, the second editing template comprises nucleotides 31-40, 30-40, 29-40, 28-40, 27-40, 26-40, 25-40, 24-40, 23-40, 22-40, 21-40, 20-40, 19-40, 18-40, 17-40, 16-40, 15-40, 14-40, 13-40, 12-40, 11-40, 10-40, 9-40, 8-40, 7-40, 6-40, 5-40, 4-40, 3-40, 2-40, or 1-40 of SEQ ID NO:3673, wherein the second spacer comprises at its 3′ end nucleotides 5-20 of SEQ ID NO:965, optionally wherein the second spacer comprises at its 3′ end SEQ ID NO:965.

[0183] In some embodiments, the second editing template comprises nucleotides 31-40, 30-40, 29-40, 28-40, 27-40, 26-40, 25-40, 24-40, 23-40, 22-40, 21-40, 20-40, 19-40, 18-40, 17-40, 16-40, 15-40, 14-40, 13-40, 12-40, 11-40, 10-40, 9-40, 8-40, 7-40, 6-40, 5-40, 4-40, 3-40, 2-40, or 1-40 of SEQ ID NO:3674, wherein the second spacer comprises at its 3′ end nucleotides 5-20 of SEQ ID NO:983, optionally wherein the second spacer comprises at its 3′ end SEQ ID NO:983.

[0184] In some embodiments, the second editing template comprises nucleotides 31-40, 30-40, 29-40, 28-40, 27-40, 26-40, 25-40, 24-40, 23-40, 22-40, 21-40, 20-40, 19-40, 18-40, 17-40, 16-40, 15-40, 14-40, 13-40, 12-40, 11-40, 10-40, 9-40, 8-40, 7-40, 6-40, 5-40, 4-40, 3-40, 2-40, or 1-40 of SEQ ID NO: 3675, wherein the second spacer comprises at its 3′ end nucleotides 5-20 of SEQ ID NO:1001, optionally wherein the second spacer comprises at its 3′ end SEQ ID NO:1001.

[0185] In some embodiments, the second editing template comprises nucleotides 31-40, 30-40, 29-40, 28-40, 27-40, 26-40, 25-40, 24-40, 23-40, 22-40, 21-40, 20-40, 19-40, 18-40, 17-40, 16-40, 15-40, 14-40, 13-40, 12-40, 11-40, 10-40, 9-40, 8-40, 7-40, 6-40, 5-40, 4-40, 3-40, 2-40, or 1-40 of SEQ ID NO:3676, wherein the second spacer comprises at its 3′ end nucleotides 5-20 of SEQ ID NO:1019, optionally wherein the second spacer comprises at its 3′ end SEQ ID NO:1019.

[0186] In some embodiments, the second editing template comprises nucleotides 31-40, 30-40, 29-40, 28-40, 27-40, 26-40, 25-40, 24-40, 23-40, 22-40, 21-40, 20-40, 19-40, 18-40, 17-40, 16-40, 15-40, 14-40, 13-40, 12-40, 11-40, 10-40, 9-40, 8-40, 7-40, 6-40, 5-40, 4-40, 3-40, 2-40, or 1-40 of SEQ ID NO:3677, wherein the second spacer comprises at its 3′ end nucleotides 5-20 of SEQ ID NO:1341, optionally wherein the second spacer comprises at its 3′ end SEQ ID NO:1341.

[0187] In some embodiments, the second editing template comprises nucleotides 31-40, 30-40, 29-40, 28-40, 27-40, 26-40, 25-40, 24-40, 23-40, 22-40, 21-40, 20-40, 19-40, 18-40, 17-40, 16-40, 15-40, 14-40, 13-40, 12-40, 11-40, 10-40, 9-40, 8-40, 7-40, 6-40, 5-40, 4-40, 3-40, 2-40, or 1-40 of SEQ ID NO:3678, wherein the second spacer comprises at its 3′ end nucleotides 5-20 of SEQ ID NO:20, optionally wherein the second spacer comprises at its 3′ end SEQ ID NO:20.

[0188] In some embodiments, the second editing template comprises nucleotides 31-40, 30-40, 29-40, 28-40, 27-40, 26-40, 25-40, 24-40, 23-40, 22-40, 21-40, 20-40, 19-40, 18-40, 17-40, 16-40, 15-40, 14-40, 13-40, 12-40, 11-40, 10-40, 9-40, 8-40, 7-40, 6-40, 5-40, 4-40, 3-40, 2-40, or 1-40 of SEQ ID NO:3679, wherein the second spacer comprises at its 3′ end nucleotides 5-20 of SEQ ID NO:77, optionally wherein the second spacer comprises at its 3′ end SEQ ID NO:77.

[0189] In some embodiments, the second editing template comprises nucleotides 31-40, 30-40, 29-40, 28-40, 27-40, 26-40, 25-40, 24-40, 23-40, 22-40, 21-40, 20-40, 19-40, 18-40, 17-40, 16-40, 15-40, 14-40, 13-40, 12-40, 11-40, 10-40, 9-40, 8-40, 7-40, 6-40, 5-40, 4-40, 3-40, 2-40, or 1-40 of SEQ ID NO:3680, wherein the second spacer comprises at its 3′ end nucleotides 5-20 of SEQ ID NO:484, optionally wherein the second spacer comprises at its 3′ end SEQ ID NO:484.

[0190] In some embodiments, the second editing template comprises nucleotides 31-40, 30-40, 29-40, 28-40, 27-40, 26-40, 25-40, 24-40, 23-40, 22-40, 21-40, 20-40, 19-40, 18-40, 17-40, 16-40, 15-40, 14-40, 13-40, 12-40, 11-40, 10-40, 9-40, 8-40, 7-40, 6-40, 5-40, 4-40, 3-40, 2-40, or 1-40 of SEQ ID NO:3681, wherein the second spacer comprises at its 3′ end nucleotides 5-20 of SEQ ID NO:58, optionally wherein the second spacer comprises at its 3′ end SEQ ID NO:58.

[0191] In some embodiments, the second editing template comprises nucleotides 31-40, 30-40, 29-40, 28-40, 27-40, 26-40, 25-40, 24-40, 23-40, 22-40, 21-40, 20-40, 19-40, 18-40, 17-40, 16-40, 15-40, 14-40, 13-40, 12-40, 11-40, 10-40, 9-40, 8-40, 7-40, 6-40, 5-40, 4-40, 3-40, 2-40, or 1-40 of SEQ ID NO:3682, wherein the second spacer comprises at its 3′ end nucleotides 5-20 of SEQ ID NO:1, optionally wherein the second spacer comprises at its 3′ end SEQ ID NO:1.

[0192] In some embodiments, the first PEgRNA comprises a sequence selected from the group consisting of SEQ ID NOs: 503-517, and wherein the second PEgRNA comprises a sequence selected from the group consisting of SEQ ID NOs: 1548-1562.

[0193] In some embodiments, the prime editing composition comprises the first PEgRNA and the second PEgRNA, wherein the first editing template comprises from 5′ to 3′ (i) a region of complementarity to the second editing template and (ii) nucleotides 8-17 of the selected sequence for the second spacer; and wherein the second editing template comprises from 5′ to 3′ (i) a region of complementarity to the first editing template and (ii) nucleotides 8-17 of the selected sequence for the first spacer.

[0194] In some embodiments, the first editing template comprises nucleotides 1-17, 2-17, 3-17, 4-17, 5-17, 6-17, 7-17, or 8-17 of the selected sequence for the second spacer, and/or wherein the second editing template comprises 1-17, 2-17, 3-17, 4-17, 5-17, 6-17, 7-17, or 8-17 of the selected sequence for the first spacer.

[0195] In some embodiments, the first editing template comprises nucleotides 3-17 of the selected sequence for the second spacer, and wherein the second editing template comprises nucleotides 3-17 of the selected sequence of the first spacer.

[0196] In some embodiments, the first editing template comprises a region of complementarity to a sequence on the second strand of the DMPK gene that is directly 3′ to nucleotide 3 of the second search target sequence, wherein the region of complementarity is about 20, about 25, about 30, about 35, about 40, about 45, or about 50 nucleotides in length.

[0197] In some embodiments, the region of complementarity between the first editing template and the sequence on the second strand of the DMPK gene is about 20-30 nucleotides in length.

[0198] In some embodiments, the second editing template comprises a region of complementarity to a sequence on the first strand of the DMPK gene that is directly 3′ to nucleotide 3 of the first search target sequence, wherein the region of complementarity is about 20, about 25, about 30, about 35, about 40, about 45, or about 50 nucleotides in length.

[0199] In some embodiments, the region of complementarity between the second editing template and the sequence on the first strand of the DMPK gene is about 20-30 nucleotides in length.

[0200] In some embodiments, the region of complementarity between the first editing template and the second editing template is about 20 to about 80 nucleotides in length.

[0201] In some embodiments, the prime editing composition comprises a region of complementarity between the first editing template and the second editing template that is about 20, about 21, about 22, about 23, about 24, about 25, about 26, about 27, about 28, about 29, about 30, about 31, about 32, about 33, about 34, about 35, about 36, about 37, about 38, about 39, about 40, about 41, about 42, about 43, about 44, about 45, about 46, about 47, about 48, about 49, about 50, about 51, about 52, about 53, about 54, about 55, about 56, about 57, about 58, about 59, about 60, about 61, about 62, about 63, about 64, about 65, about 66, about 67, about 68, about 69, about 70, about 71, about 72, about 73, about 74, about 75, about 76, about 77, about 78, about 79, or about 80 nucleotides in length.

[0202] In some embodiments, the prime editing composition of comprises a region of complementarity between the first editing template and the second editing template that is between 20 and 80 nucleotides; between 21 and 80 nucleotides; between 22 and 80 nucleotides; between 23 and 80 nucleotides; between 24 and 80 nucleotides; between 25 and 80 nucleotides; between 26 and 80 nucleotides; between 27 and 80 nucleotides; between 28 and 80 nucleotides; between 29 and 80 nucleotides; between 30 and 80 nucleotides; between 31 and 80 nucleotides; between 32 and 80 nucleotides; between 33 and 80 nucleotides; between 34 and 80 nucleotides; between 35 and 80 nucleotides; between 36 and 80 nucleotides; between 37 and 80 nucleotides; between 38 and 80 nucleotides; between 39 and 80 nucleotides; between 40 and 80 nucleotides; between 41 and 80 nucleotides; between 42 and 80 nucleotides; between 43 and 80 nucleotides; between 44 and 80 nucleotides; between 45 and 80 nucleotides; between 46 and 80 nucleotides; between 47 and 80 nucleotides; between 48 and 80 nucleotides; between 49 and 80 nucleotides; between 50 and 80 nucleotides; between 51 and 80 nucleotides; between 52 and 80 nucleotides; between 53 and 80 nucleotides; between 54 and 80 nucleotides; between 55 and 80 nucleotides; between 56 and 80 nucleotides; between 57 and 80 nucleotides; between 58 and 80 nucleotides; between 59 and 80 nucleotides; between 60 and 80 nucleotides; between 61 and 80 nucleotides; between 62 and 80 nucleotides; between 63 and 80 nucleotides; between 64 and 80 nucleotides; between 65 and 80 nucleotides; between 66 and 80 nucleotides; between 67 and 80 nucleotides; between 68 and 80 nucleotides; between 69 and 80 nucleotides; between 70 and 80 nucleotides; between 71 and 80 nucleotides; between 72 and 80 nucleotides; between 73 and 80 nucleotides; between 74 and 80 nucleotides; between 75 and 80 nucleotides; between 76 and 80 nucleotides; between 77 and 80 nucleotides; between 78 and 80 nucleotides; between 20 and 80 nucleotides; between 20 and 79 nucleotides; between 20 and 78 nucleotides; between 20 and 77 nucleotides; between 20 and 76 nucleotides; between 20 and 75 nucleotides; between 20 and 74 nucleotides; between 20 and 73 nucleotides; between 20 and 72 nucleotides; between 20 and 71 nucleotides; between 20 and 70 nucleotides; between 20 and 69 nucleotides; between 20 and 68 nucleotides; between 20 and 67 nucleotides; between 20 and 66 nucleotides; between 20 and 65 nucleotides; between 20 and 64 nucleotides; between 20 and 63 nucleotides; between 20 and 62 nucleotides; between 20 and 61 nucleotides; between 20 and 60 nucleotides; between 20 and 59 nucleotides; between 20 and 58 nucleotides; between 20 and 57 nucleotides; between 20 and 56 nucleotides; between 20 and 55 nucleotides; between 20 and 54 nucleotides; between 20 and 53 nucleotides; between 20 and 52 nucleotides; between 20 and 51 nucleotides; between 20 and 50 nucleotides; between 20 and 49 nucleotides; between 20 and 48 nucleotides; between 20 and 47 nucleotides; between 20 and 46 nucleotides; between 20 and 45 nucleotides; between 20 and 44 nucleotides; between 20 and 43 nucleotides; between 20 and 42 nucleotides; between 20 and 41 nucleotides; between 20 and 40 nucleotides; between 20 and 39 nucleotides; between 20 and 38 nucleotides; between 20 and 37 nucleotides; between 20 and 36 nucleotides; between 20 and 35 nucleotides; between 20 and 34 nucleotides; between 20 and 33 nucleotides; between 20 and 32 nucleotides; between 20 and 31 nucleotides; between 20 and 30 nucleotides; between 20 and 29 nucleotides; between 20 and 28 nucleotides; between 20 and 27 nucleotides; between 20 and 26 nucleotides; between 20 and 25 nucleotides; between 20 and 24 nucleotides; between 20 and 23 nucleotides; or between 20 and 22 nucleotides in length.

[0203] In some embodiments, the prime editing composition comprises a region of complementarity between the first editing template and the second editing template that is at least 20, at least 21, at least 22, at least 23, at least 24, at least 25, at least 26, at least 27, at least 28, at least 29, at least 30, at least 31, at least 32, at least 33, at least 34, at least 35, at least 36, at least 37, at least 38, at least 39, at least 40, at least 41, at least 42, at least 43, at least 44, at least 45, at least 46, at least 47, at least 48, at least 49, at least 50, at least 51, at least 52, at least 53, at least 54, at least 55, at least 56, at least 57, at least 58, at least 59, at least 60, at least 61, at least 62, at least 63, at least 64, at least 65, at least 66, at least 67, at least 68, at least 69, at least 70, at least 71, at least 72, at least 73, at least 74, at least 75, at least 76, at least 77, at least 78, at least 79, or at least 80 nucleotides in length.

[0204] In some embodiments, the prime editing composition comprises a region of complementarity between the first editing template and the second editing template that is no more than 20, no more than 21, no more than 22, no more than 23, no more than 24, no more than 25, no more than 26, no more than 27, no more than 28, no more than 29, no more than 30, no more than 31, no more than 32, no more than 33, no more than 34, no more than 35, no more than 36, no more than 37, no more than 38, no more than 39, no more than 40, no more than 41, no more than 42, no more than 43, no more than 44, no more than 45, no more than 46, no more than 47, no more than 48, no more than 49, no more than 50, no more than 51, no more than 52, no more than 53, no more than 54, no more than 55, no more than 56, no more than 57, no more than 58, no more than 59, no more than 60, no more than 61, no more than 62, no more than 63, no more than 64, no more than 65, no more than 66, no more than 67, no more than 68, no more than 69, no more than 70, no more than 71, no more than 72, no more than 73, no more than 74, no more than 75, no more than 76, no more than 77, no more than 78, no more than 79, or no more than 80 nucleotides in length.

[0205] In some embodiments, the region of complementarity between the first editing template and the second editing template is about 20 to about 40 nucleotides in length.

[0206] In some embodiments, the region of complementarity between the first editing template and the second editing template is 23-38 nucleotides in length.

[0207] In an aspect, a prime editing composition comprises a first prime editing guide RNA (PEgRNA) or one or more polynucleotides encoding the first PEgRNA and a second PEgRNA or one or more polynucleotides encoding the second PEgRNA, wherein (a) the first PEgRNA comprises: (i) a first spacer comprising at its 3′ end nucleotides 5-20 of a Spacer sequence selected from any one of Tables 1A, 2A, 3A, 4A, 5A, 6A, 7A, 8A, 9A, 10A, 11A, 12A, 13A, 14A, 15A, 16A, 17A, 18A, and 19A; (ii) a first gRNA core capable of binding to a Cas9 protein; (iii) a first extension arm comprising: a first primer binding site (PBS) comprising a PBS sequence selected from the same Table as the first spacer, and a first editing template comprising an RTT sequence selected from Table 37 and has an RTT Paring NO: x in Table 37; and (b) the second PEgRNA comprises: (i) a second spacer comprising at its 3′ end nucleotides 5-20 of a Spacer sequence selected from any one of Tables 20A, 21A, 22A, 23A, 24A, 25A, 26A, 27A, 28A, 29A, 30A, 31A, 32A, 33A, 34A, 35A, and 36A; (ii) a second gRNA core capable of binding to a Cas9 protein; (iii) a second extension arm comprising: a second primer binding site (PBS) comprising a PBS sequence selected from the same Table as the second spacer, and a second editing template comprising an RTT sequence selected from Table 38 and has an RTT paring NO: x in Table 38; wherein the RTT paring number x in (a) and (b) are the same integer.

[0208] In some embodiments, the first editing template and the second editing template have the same length and are perfectly complementary to each other.

[0209] In an aspect, a prime editing composition comprising a first prime editing guide RNA (PEgRNA) or a one or more polynucleotides encoding the first PEgRNA and a second PEgRNA or one or more polynucleotides encoding the second PEgRNA, wherein (a) the first PEgRNA comprises: (i) a first spacer comprising at its 3′ end nucleotides 5-20 of a Spacer sequence selected from Table xA, wherein x is an integer from 1 to 19; (ii) a first gRNA core capable of binding to a Cas9 protein; (iii) a first extension arm comprising: a first primer binding site (PBS) comprising a PBS sequence selected from the same Table as the first spacer, and a first editing template comprising an RTT sequence selected from Table 39, wherein the Paring Spacer number of the RTT sequence in Table 39 is y; and (b) the second PEgRNA comprises: (iv) a second spacer comprising at its 3′ end nucleotides 5-20 of a Spacer sequence selected from Table yA, wherein y is an integer from 20 to 36; (v) a second gRNA core capable of binding to a Cas9 protein; (vi) a second extension arm comprising: a second editing template comprising an RTT sequence selected from Table 40, wherein the Paring Spacer number of the RTT sequence in Table 40 is x, and a second primer binding site (PBS) comprising a PBS sequence selected from the same Table as the second spacer, wherein x in (a) and (b) are the same integer, and wherein y in (a) and (b) are the same integer.

[0210] In some embodiments, the first spacer and/or the second spacer is from 16 to 22 nucleotides in length.

[0211] In some embodiments, the first spacer and/or the second spacer comprises at its 3′ the selected sequence.

[0212] In some embodiments, the first spacer and/or the second spacer is 20 nucleotides in length.

[0213] In some embodiments, the first gRNA core and the second gRNA core comprise the same sequence.

[0214] In some embodiments, the first gRNA core and the second gRNA core each comprises SEQ ID NO: 3641.

[0215] In some embodiments, the first spacer, the first gRNA core, the first editing template, and the first PBS form a contiguous sequence in a single molecule.

[0216] In some embodiments, the first pegRNA comprises from 5′ to 3′ the first spacer, the first gRNA core, the first editing template, and the first PBS.

[0217] In some embodiments, the second spacer, the second gRNA core, the second editing template, and the second PBS form a contiguous sequence in a single molecule.

[0218] In some embodiments, the second pegRNA comprises from 5′ to 3′ the second spacer, the second gRNA core, the second editing template, and the second PBS.

[0219] In some embodiments, the prime editing composition of any one of the embodiments described above comprises the first PEgRNA and the second PEgRNA, wherein the first PEgRNA and/or the second PEgRNA further comprises 3′ mN*mN*mN*N and 5′mN*mN*mN*modifications, where m indicates that the nucleotide contains a 2′-O-Me modification and a * indicates the presence of a phosphorothioate bond.

[0220] In some embodiments, the prime editing composition of any one of the embodiments described above further comprises a prime editor or one or more polynucleotides encoding the prime editor, wherein the prime editor comprises a Cas9 nickase having a nuclease inactivating mutation in the HNH domain and a reverse transcriptase.

[0221] In some embodiments, the Cas9 nickase comprises an amino acid sequence having at least 80%, 85%, 90%, 95%, 96%, 97%, 98%, 99%, or 100% identity to SEQ ID NO: 3582.

[0222] In some embodiments, the reverse transcriptase comprises an amino acid sequence having at least 80%, 85%, 90%, 95%, 96%, 97%, 98%, 99%, or 100% identity to SEQ ID NO: 3579.

[0223] In some embodiments, the sequence identities are determined by Needleman-Wunsch alignment of two protein sequences with Gap Costs set to Existence: 11 Extension: 1 where percent identity is calculated by dividing the number of identities by the length of the alignment.

[0224] In some embodiments, the prime editor is a fusion protein.

[0225] In some embodiments, the one or more polynucleotides comprise (a) a first sequence encoding an N-terminal portion of the Cas9 nickase and an intein-N and (b) a second sequence encoding a intein-C, a C-terminal portion of the Cas9 nickase, and the reverse transcriptase.

[0226] In some embodiments, the prime editing composition comprises one or more vectors comprising the one or more polynucleotides encoding the first PEgRNA, the one or more polynucleotides encoding the second PEgRNA, and the one or more polynucleotides encoding the prime editor.

[0227] In some embodiments, the one or more vectors are AAV vectors.

[0228] In some embodiments, provided herein is an LNP comprising the prime editing composition of any one of the above described embodiments.

[0229] In an aspect, provided herein is a method of editing a DMPK gene, the method comprising contacting the DMPK gene with (a) the prime editing composition of any one of Embodiments 1-82 and a prime editor comprising a Cas9 nickase having a nuclease inactivation mutation in the HNH domain and a reverse transcriptase, (b) the prime editing composition of any one of Embodiments 83-90, or (c) the LNP of Embodiment 91.

[0230] In some embodiments, the DMPK gene is in a cell.

[0231] In some embodiments, the cell is a mammalian cell.

[0232] In some embodiments, the cell is a human cell.

[0233] In some embodiments, the cell is a fibroblast, a myoblast, a myosatellite, a muscle progenitor cell, a cardiomyocyte, a differentiated muscle cell, a skeletal muscle cell, or a smooth muscle cell.

[0234] In some embodiments, the cell is in a subject.

[0235] In some embodiments, the subject is a human.

[0236] In some embodiments, the cell is from a subject having myotonic dystrophy type 1.

[0237] In some embodiments, provided herein is a cell generated by any of the methods described above.

[0238] In some embodiments, provided herein is a population of cells generated by any of the methods described above.

[0239] In an aspect, provided herein is a method for treating myotonic dystrophy type 1 in a subject in need thereof, the method comprising administering to the subject (a) the prime editing composition in the embodiments described above and a prime editor comprising a Cas9 nickase having a nuclease inactivation mutation in the HNH domain and a reverse transcriptase, (b) the prime editing composition the embodiments described above, (c) the LNP, the cell, or the population of cells of the embodiments described above.

### INCORPORATION BY REFERENCE

[0240] All publications, patents, and patent applications mentioned in this specification are herein incorporated by reference to the same extent as if each individual publication, patent, or patent application was specifically and individually indicated to be incorporated by reference.

### BRIEF DESCRIPTION OF THE DRAWINGS

[0241] The novel features of the invention are set forth with particularity in the appended claims. A better understanding of the features and advantages of the present invention will be obtained by reference to the following detailed description that sets forth illustrative embodiments, in which the principles of the invention are utilized, and the accompanying drawings of which:

[0242] FIG. 1 depicts a schematic of a prime editing guide RNA (PEgRNA) binding to a double stranded target DNA sequence.

[0243] FIG. 2 depicts a PEgRNA architectural overview in an exemplary schematic of PEgRNA designed for a prime editor.

[0244] FIG. 3 is a schematic showing the spacer and gRNA core part of an exemplary guide RNA, in two separate molecules. The rest of the PEgRNA structure is not shown.

[0245] FIG. 4A depicts an exemplary schematic of a dual prime editing system for editing both strands of a double stranded target DNA. Same color/shading indicates complementarity or identity between sequences.

[0246] FIG. 4B depicts an exemplary schematic of dual prime editing with a replacement duplex (RD) comprising an overlap duplex (OD). Same color/shading indicates complementarity or identity between sequences.

[0247] FIG. 4C depicts an exemplary schematic of dual prime editing. Same color/shading indicates complementarity or identity between sequences.

[0248] FIG. 4D depicts an exemplary schematic of dual prime editing. Same color/shading indicates complementarity or identity between sequences.

[0249] FIG. 4E depicts an exemplary schematic of dual prime editing. Same color/shading indicates complementarity or identity between sequences.

[0250] FIG. 4F depicts an exemplary schematic of dual prime editing. Same color/shading indicates complementarity or identity between sequences.

[0251] FIG. 4G depicts an exemplary schematic of dual prime editing. Same color/shading indicates complementarity or identity between sequences.

### DETAILED DESCRIPTION OF THE INVENTION

[0252] Provided herein, in some embodiments, are compositions and methods to edit the target gene DMPK with dual prime editing. In certain embodiments, provided herein are compositions and methods for correction of mutations in the DMPK gene associated with myotonic dystrophy type 1 (DM1). Compositions provided herein can comprise prime editors (PEs) and engineered guide polynucleotides, e.g., prime editing guide RNAs (PEgRNAs), that can direct PEs to specific DNA targets and can encode DNA edits on the DMPK gene, including correction of disease-causing mutations in the DMPK gene.

[0253] The following description and examples illustrate embodiments of the present disclosure in detail. It is to be understood that this disclosure is not limited to the particular embodiments described herein and as such can vary. Those of skill in the art will recognize that there are numerous variations and modifications of this disclosure, which are encompassed within its scope. Although various features of the present disclosure can be described in the context of a single embodiment, the features can also be provided separately or in any suitable combination. Conversely, although the present disclosure can be described herein in the context of separate embodiments for clarity, the present disclosure can also be implemented in a single embodiment.

### Definitions

[0254] This disclosure refers to position numbers in polynucleotides. Unless otherwise noted, nucleotide x, in a polynucleotide sequence, refers to the nucleotide at position number x in the polynucleotide sequence from a 5′ to 3′ order.

[0255] Unless defined otherwise, all technical and scientific terms used herein have the same meaning as is commonly understood by one of ordinary skill in the art.

[0256] The terminology used herein is for the purpose of describing particular embodiments only and is not intended to be limiting. As used herein, the singular forms “a”, “an” and “the” are intended to include the plural forms as well, unless the context clearly indicates otherwise. Furthermore, to the extent that the terms “including”, “includes”, “having”, “has”, “with”, or variants thereof are used herein, they mean “comprising”.

[0257] Unless otherwise specified, the words “comprising”, “comprise”, “comprises”, “having”, “have”, “has”, “including”, “includes”, “include”, “containing”, “contains” and “contain” are inclusive or open-ended and do not exclude additional, unrecited elements or method steps.

[0258] Reference to “some embodiments”, “an embodiment”, “one embodiment”, or “other embodiments” means that a particular feature or characteristic described in connection with the embodiments is included in at least one or more embodiments, but not necessarily all embodiments, of the present disclosure.

[0259] The term “about” or “approximately” in relation to a numerical means, a range of values that fall within 10% greater than or less than the value. For example, about x means x±(10%*x).

[0260] The term “between” when used with reference to a range of numbers, means the range of numbers including the first and the last number in the range.

[0261] As used herein, a “cell” can generally refer to a biological cell. A cell can be the basic structural, functional and/or biological unit of a living organism. A cell can originate from any organism having one or more cells. Some non-limiting examples include: a prokaryotic cell, eukaryotic cell, a bacterial cell, an archaeal cell, a cell of a single-cell eukaryotic organism, a protozoa cell, a cell from a plant, an animal cell, a cell from an invertebrate animal (e.g. fruit fly, cnidarian, echinoderm, nematode, etc.), a cell from a vertebrate animal (e.g., fish, amphibian, reptile, bird, mammal), a cell from a mammal (e.g., a pig, a cow, a goat, a sheep, a rodent, a rat, a mouse, a non-human primate, a human, etc.), et cetera. Sometimes a cell may not originate from a natural organism (e.g., a cell can be synthetically made, sometimes termed an artificial cell).

[0262] In some embodiments, the cell is a human cell. A cell may be of or derived from different tissues, organs, and/or cell types. In some embodiments, the cell is a primary cell. In some embodiments, the term primary cell means a cell isolated from an organism, e.g., a mammal, which is grown in tissue culture (i.e., in vitro) for the first time before subdivision and transfer to a subculture. In some non-limiting examples, mammalian primary cells can be modified through introduction of one or more polynucleotides, polypeptides, and/or prime editing compositions (e.g., through transfection, transduction, electroporation and the like) and further passaged. Such modified mammalian primary cells include muscle cells (e.g., cardiac muscle cells, smooth muscle cells, myosatellite cells), epithelial cells (e.g., mammary epithelial cells, intestinal epithelial cells, hepatocytes), endothelial cells, glial cells, neural cells, formed elements of the blood (e.g., lymphocytes, bone marrow cells), precursors of any of these somatic cell types, and stem cells. In some embodiments, the cell is a fibroblast. In some embodiments, the cell is a human fibroblast. In some embodiments, the cell is a myogenic cell. In some embodiments, the cell is a myoblast. In some embodiments, the cell is a human myogenic cell. In some embodiments, the cell is a human myoblast. In some embodiments, the cell is a primary muscle cell. In some embodiments, the cell is a myosatellite cell (a satellite cell). In some embodiments, the cell is a human myosatellite cell (a satellite cell). In some embodiments, the cell is a stem cell. In some embodiments, the cell is an embryonic stem cell (ESC). In some embodiments, the cell is an induced human pluripotent stem cell (iPSC). In some embodiments, the cell is a human stem cell. In some embodiments, the cell is a human embryonic stem cell.

[0263] In some embodiments, a cell is not isolated from an organism but forms part of a tissue or organ of an organism, e.g., a mammal. In some non-limiting examples, mammalian cells include muscle cells (e.g., cardiac muscle cells, smooth muscle cells, myosatellite cells), epithelial cells (e.g., mammary epithelial cells, intestinal epithelial cells, hepatocytes), endothelial cells, glial cells, neural cells, formed elements of the blood (e.g., lymphocytes, bone marrow cells), precursors of any of these somatic cell types, and stem cells. In some embodiments, the cell is a primary muscle cell. In some embodiments, the cell is a myosatellite cell (a satellite cell). In some embodiments, the cell is a human myosatellite cell (a satellite cell). In some embodiments, the cell is a stem cell. In some embodiments, the cell is a human stem cell.

[0264] In some embodiments, the cell is a progenitor cell. In some embodiments, the cell is a differentiated cell. In some embodiments, the cell is a fibroblast. In some embodiments, the cell is a myogenic cell. In some embodiments, the cell is a myoblast. In some embodiments, the cell is a human myogenic cell. In some embodiments, the cell is a human myoblast. In some embodiments, the cell is a differentiated muscle cell. In some embodiments, the cell is a myosatellite cell. In some embodiments, the cell is a skeletal muscle cell. In some embodiments, the skeletal muscle cell is differentiated from an iPSC, ESC or myosatellite cell. In some embodiments, the cell is a differentiated human cell. In some embodiments, the cell is a human fibroblast. In some embodiments, the cell is a differentiated human muscle cell. In some embodiments, the cell is a human myosatellite cell. In some embodiments, the cell is a human skeletal muscle cell. In some embodiments, the human skeletal muscle cell is differentiated from a human iPSC, human ESC or human myosatellite cell. In some embodiments, a human myosatellite cell is differentiated from a human iPSC or human ESC.

[0265] In some embodiments, the cell comprises a prime editor or a prime editing composition. In some embodiments, the cell comprises a dual prime editing composition comprising a prime editor and at least two PEgRNAs that are different from each other. In some embodiments, the cell is from a human subject. In some embodiments, the human subject has a disease or condition associated with one or more mutations to be corrected by prime editing, for example, myotonic dystrophy type 1 (DM1). In some embodiments, the cell is from a human subject, and comprises a prime editor or a prime editing composition for correction of the one or more mutations. In some embodiments, the cell is from the human subject and the mutation has been edited or corrected by prime editing. In some embodiments, the cell is in a human subject, and comprises a prime editor or a prime editing composition for correction of the one or more mutations. In some embodiments, the cell is from the human subject and the mutation has been edited or corrected by prime editing.

[0266] The term “substantially” as used herein may refer to a value approaching 100% of a given value. In some embodiments, the term may refer to an amount that may be at least about 70%, 80%, 90%, 91%, 92%, 93%, 94%, 95%, 96%, 97%, 98%, 99%, 99.9%, or 99.99% of a total amount. In some embodiments, the term may refer to an amount that may be about 100% of a total amount.

[0267] The terms “protein” and “polypeptide” can be used interchangeably to refer to a polymer of two or more amino acids joined by covalent bonds (e.g., an amide bond) that can adopt a three-dimensional conformation. In some embodiments, a protein or polypeptide comprises at least 10 amino acids, 15 amino acids, 20 amino acids, 30 amino acids or 50 amino acids joined by covalent bonds (e.g., amide bonds). In some embodiments, a protein comprises at least two amide bonds. In some embodiments, a protein comprises multiple amide bonds. In some embodiments, a protein comprises an enzyme, enzyme precursor proteins, regulatory protein, structural protein, receptor, nucleic acid binding protein, a biomarker, a member of a specific binding pair (e.g., a ligand or aptamer), or an antibody. In some embodiments, a protein may be a full-length protein (e.g., a fully processed protein having certain biological function). In some embodiments, a protein may be a variant or a fragment of a full-length protein. For example, in some embodiments, a Cas9 protein domain comprises an H840A amino acid substitution compared to a naturally occurring S. pyogenes Cas9 protein. A variant of a protein or enzyme, for example a variant reverse transcriptase, comprises a polypeptide having an amino acid sequence that is about 60% identical, about 70% identical, about 80% identical, about 90% identical, about 95% identical, about 96% identical, about 97% identical, about 98% identical, about 99% identical, about 99.5% identical, or about 99.9% identical to the amino acid sequence of a reference protein.

[0268] In some embodiments, a protein comprises one or more protein domains or subdomains. As used herein, the term “polypeptide domain”, “protein domain”, or “domain” when used in the context of a protein or polypeptide, refers to a polypeptide chain that has one or more biological functions, e.g., a catalytic function, a protein-protein binding function, or a protein-DNA function. In some embodiments, a protein comprises multiple protein domains. In some embodiments, a protein comprises multiple protein domains that are naturally occurring. In some embodiments, a protein comprises multiple protein domains from different naturally occurring proteins. For example, in some embodiments, a prime editor may be a fusion protein comprising a Cas9 protein domain of S. pyogenes and a reverse transcriptase protein domain of Moloney murine leukemia virus. A protein that comprises amino acid sequences from different origins or naturally occurring proteins may be referred to as a fusion, or chimeric protein.

[0269] In some embodiments, a protein comprises a functional variant or functional fragment of a full-length wild type protein. A “functional fragment” or “functional portion”, as used herein, refers to any portion of a reference protein (e.g., a wild type protein) that encompasses less than the entire amino acid sequence of the reference protein while retaining one or more of the functions, e.g., catalytic or binding functions. For example, a functional fragment of a reverse transcriptase may encompass less than the entire amino acid sequence of a wild type reverse transcriptase, but retains the ability under at least one set of conditions to catalyze the polymerization of a polynucleotide. When the reference protein is a fusion of multiple functional domains, a functional fragment thereof may retain one or more of the functions of at least one of the functional domains. For example, a functional fragment of a Cas9 may encompass less than the entire amino acid sequence of a wild type Cas9, but retains its DNA binding ability and lacks its nuclease activity partially or completely.

[0270] A “functional variant” or “functional mutant”, as used herein, refers to any variant or mutant of a reference protein (e.g., a wild type protein) that encompasses one or more alterations to the amino acid sequence of the reference protein while retaining one or more of the functions, e.g., catalytic or binding functions. In some embodiments, the one or more alterations to the amino acid sequence comprises amino acid substitutions, insertions or deletions, or any combination thereof. In some embodiments, the one or more alterations to the amino acid sequence comprises amino acid substitutions. For example, a functional variant of a reverse transcriptase may comprise one or more amino acid substitutions compared to the amino acid sequence of a wild type reverse transcriptase, but retains the ability under at least one set of conditions to catalyze the polymerization of a polynucleotide. When the reference protein is a fusion of multiple functional domains, a functional variant thereof may retain one or more of the functions of at least one of the functional domains. For example, in some embodiments, a functional variant of a Cas9 may comprise one or more amino acid substitutions in a nuclease domain, e.g., an H840A amino acid substitution, compared to the amino acid sequence of a wild type Cas9, but retains the DNA binding ability and lacks the nuclease activity partially or completely.

[0271] The term “function” and its grammatical equivalents as used herein may refer to a capability of operating, having, or serving an intended purpose. Functional may comprise any percent from baseline to 100% of an intended purpose. For example, functional may comprise or comprise about 5%, 10%, 15%, 20%, 25%, 30%, 35%, 40%, 45%, 50%, 55%, 60%, 65%, 70%, 75%, 80%, 85%, 90%, 95%, or up to about 100% of an intended purpose. In some embodiments, the term functional may mean over or over about 100% of normal function, for example, 125%, 150%, 175%, 200%, 250%, 300%, 400%, 500%, 600%, 700% or up to about 1000% of an intended purpose.

[0272] In some embodiments, a protein or polypeptide includes naturally occurring amino acids (e.g., one of the twenty amino acids commonly found in peptides synthesized in nature, and known by the one letter abbreviations A, R, N, C, D, Q, E, G, H, I, L, K, M, F, P, S, T, W, Y and V). In some embodiments, a protein or polypeptides includes non-naturally occurring amino acids (e.g., amino acids which is not one of the twenty amino acids commonly found in peptides synthesized in nature, including synthetic amino acids, amino acid analogs, and amino acid mimetics). In some embodiments, a protein or polypeptide is modified.

[0273] In some embodiments, a protein comprises an isolated polypeptide. The term “isolated” means free or removed to varying degrees from components which normally accompany it as found in the natural state or environment. For example, a polypeptide naturally present in a living animal is not isolated, and the same polypeptide partially or completely separated from the coexisting materials of its natural state is isolated.

[0274] In some embodiments, a protein is present within a cell, a tissue, an organ, or a virus particle. In some embodiments, a protein is present within a cell or a part of a cell (e.g., a bacteria cell, a plant cell, or an animal cell). In some embodiments, the cell is in a tissue, in a subject, or in a cell culture. In some embodiments, the cell is a microorganism (e.g., a bacterium, fungus, protozoan, or virus). In some embodiments, a protein is present in a mixture of analytes (e.g., a lysate). In some embodiments, the protein is present in a lysate from a plurality of cells or from a lysate of a single cell.

[0275] The terms “homologous,” “homology,” or “percent homology” as used herein refer to the degree of sequence identity between an amino acid or polynucleotide sequence and a corresponding reference sequence. “Homology” can refer to polymeric sequences, e.g., polypeptide or DNA sequences that are similar. Homology can mean, for example, nucleic acid sequences with at least about: 50%, 55%, 60%, 65%, 70%, 75%, 80%, 81%, 82%, 83%, 84%, 85%, 86%, 87%, 88%, 89%, 90%, 91%, 92%, 93%, 94%, 95%, 96%, 97%, 98%, 99%, or 100% identity. In other embodiments, a “homologous sequence” of nucleic acid sequences may exhibit 93%, 95% or 98% sequence identity to the reference nucleic acid sequence. For example, a “region of homology to a genomic region” can be a region of DNA that has a similar sequence to a given genomic region in the genome. A region of homology can be of any length that is sufficient to promote stable binding of a spacer, primer binding site or protospacer sequence to the complementary sequence of a genomic region. For example, the region of homology can comprise at least 5, 10, 11, 12, 13, 14, 15, 16, 17, 18, 19, 20, 21, 22, 23, 24, 25, 30, 35, 40, 45, 50, 55, 60, 65, 70, 75, 80, 85, 90, 95, 100, 200, 300, 400, 500, 600, 700, 800, 900, 1000, 1100, 1200, 1300, 1400, 1500, 1600, 1700, 1800, 1900, 2000, 2100, 2200, 2300, 2400, 2500, 2600, 2700, 2800, 2900, 3000, 3100 or more bases in length such that the region of homology has sufficient homology to undergo binding to the complementary sequence of a corresponding genomic region.

[0276] When a percentage of sequence homology or identity is specified, in the context of two nucleic acid sequences or two polypeptide sequences, the percentage of homology or identity generally refers to the alignment of two or more sequences across a portion of their length when compared and aligned for maximum correspondence. When a position in the compared sequence can be occupied by the same base or amino acid, then the molecules can be homologous at that position. Unless stated otherwise, sequence homology or identity is assessed over the specified length of the nucleic acid, polypeptide or portion thereof. In some embodiments, the homology or identity is assessed over a functional portion or specified portion of the length.

[0277] Alignment of sequences for assessment of sequence homology can be conducted by algorithms known in the art, such as the Basic Local Alignment Search Tool (BLAST) algorithm, which is described in Altschul et al, J. Mol. Biol. 215:403-410, 1990. A publicly available, internet interface, for performing BLAST analyses is accessible through the National Center for Biotechnology Information. Additional known algorithms include those published in: Smith & Waterman, “Comparison of Biosequences”, Adv. Appl. Math. 2:482, 1981; Needleman & Wunsch, “A general method applicable to the search for similarities in the amino acid sequence of two proteins” J. Mol. Biol. 48:443, 1970; Pearson & Lipman “Improved tools for biological sequence comparison”, Proc. Natl. Acad. Sci. USA 85:2444, 1988; or by automated implementation of these or similar algorithms. Global alignment programs may also be used to align similar sequences of roughly equal size. Examples of global alignment programs include NEEDLE (available at www.ebi.ac.uk/Tools/psa/emboss_needle/) which is part of the EMBOSS package (Rice P et al., Trends Genet., 2000; 16: 276-277), and the GGSEARCH program https://fasta.bioch.virginia.edu/fasta_www2/, which is part of the FASTA package (Pearson W and Lipman D, 1988, Proc. Natl. Acad. Sci. USA, 85: 2444-2448). Both of these programs are based on the Needleman-Wunsch algorithm which is used to find the optimum alignment (including gaps) of two sequences along their entire length. A detailed discussion of sequence analysis can also be found in Unit 19.3 of Ausubel et al (“Current Protocols in Molecular Biology” John Wiley & Sons Inc, 1994-1998, Chapter 15, 1998). In some embodiments, alignment between a query sequence and a reference sequence is performed with Needleman-Wunsch alignment with Gap Costs set to Existence: 11 Extension: 1 where percent identity is calculated by dividing the number of identities by the length of the alignment, as further described in Altschul et al. (“Gapped BLAST and PSI-BLAST: a new generation of protein database search programs”, Nucleic Acids Res. 25:3389-3402, 1997) and Altschul et al, (“Protein database searches using compositionally adjusted substitution matrices”, FEBS J. 272:5101-5109, 2005).

[0278] A skilled person understands that amino acid (or nucleotide) positions may be determined in homologous sequences based on alignment, for example, “H840” in a reference Cas9 sequence may correspond to H839, or another position in a Cas9 homolog.

[0279] The term “polynucleotide” or “nucleic acid molecule” can be any polymeric form of nucleotides, including DNA, RNA, a hybridization thereof, or RNA-DNA chimeric molecules. In some embodiments, a polynucleotide comprises cDNA, genomic DNA, mRNA, tRNA, rRNA, or microRNA. In some embodiments, a polynucleotide is double stranded, e.g., a double-stranded DNA in a gene. In some embodiments, a polynucleotide is single-stranded or substantially single-stranded, e.g., single-stranded DNA or an mRNA. In some embodiments, a polynucleotide is a cell-free nucleic acid molecule. In some embodiments, a polynucleotide circulates in blood. In some embodiments, a polynucleotide is a cellular nucleic acid molecule. In some embodiments, a polynucleotide is a cellular nucleic acid molecule in a cell circulating in blood.

[0280] Polynucleotides can have any three-dimensional structure. The following are nonlimiting examples of polynucleotides: a gene or gene fragment (for example, a probe, primer, EST or SAGE tag), an exon, an intron, intergenic DNA (including, without limitation, heterochromatic DNA), messenger RNA (mRNA), transfer RNA (tRNA), ribosomal RNA (rRNA), a ribozyme, cDNA, a recombinant polynucleotide, a branched polynucleotide, a plasmid, a vector, isolated DNA, isolated RNA, sgRNA, guide RNA, a nucleic acid probe, a primer, an snRNA, a long non-coding RNA, a snoRNA, a siRNA, a miRNA, a tRNA-derived small RNA (tsRNA), an antisense RNA, an shRNA, or a small rDNA-derived RNA (srRNA).

[0281] In some embodiments, a polynucleotide comprises deoxyribonucleotides, ribonucleotides or analogs thereof. In some embodiments, a polynucleotide comprises modified nucleotides, such as methylated nucleotides and nucleotide analogs. If present, modifications to the nucleotide structure can be imparted before or after assembly of the polynucleotide. The sequence of nucleotides can be interrupted by non-nucleotide components. A polynucleotide can be further modified after polymerization, such as by conjugation with a labeling component.

[0282] In some embodiments, a polynucleotide is composed of a specific sequence of four nucleotide bases: adenine (A); cytosine (C); guanine (G); thymine (T); and uracil (U) for thymine when the polynucleotide is RNA. In some embodiments, the polynucleotide may comprise one or more other nucleotide bases, such as inosine (I), which is read by the translation machinery as guanine (G).

[0283] In some embodiments, a polynucleotide may be modified. As used herein, the terms “modified” or “modification” refers to chemical modification with respect to the A, C, G, T and U nucleotides. In some embodiments, modifications may be on the nucleoside base and/or sugar portion of the nucleosides that comprise the polynucleotide. In some embodiments, the modification may be on the internucleoside linkage (e.g., phosphate backbone). In some embodiments, multiple modifications are included in the modified nucleic acid molecule. In some embodiments, a single modification is included in the modified nucleic acid molecule.

[0284] The term “complement”, “complementary”, or “complementarity”, as used herein, refers to the ability of two polynucleotide molecules to base pair with each other. Complementary polynucleotides may base pair via hydrogen bonding, which may be Watson Crick, Hoogsteen or reversed Hoogsteen hydrogen bonding. For example, an adenine on one polynucleotide molecule will base pair to a thymine or uracil on a second polynucleotide molecule and a cytosine on one polynucleotide molecule will base pair to a guanine on a second polynucleotide molecule. Two polynucleotide molecules are complementary to each other when a first polynucleotide molecule comprising a first nucleotide sequence can base pair with a second polynucleotide molecule comprising a second nucleotide sequence. For instance, the two DNA molecules 5′-ATGC-3′ and 5′-GCAT-3′ are complementary, and the complement of the DNA molecule 5′-ATGC-3′ is 5′-GCAT-3′. A percentage of complementarity indicates the percentage of nucleotides in a polynucleotide molecule which can base pair with a second polynucleotide molecule (e.g., 5, 6, 7, 8, 9, 10 out of 10 being 50%, 60%, 70%, 80%, 90%, and 100% complementary, respectively). “Perfectly complementary” means that all the contiguous nucleotides of a polynucleotide molecule will base pair with the same number of contiguous nucleotides in a second polynucleotide molecule. “Substantially complementary” as used herein refers to a degree of complementarity that can be 70%, 75%, 80%, 85%, 90%, 95%, 97%, 98%, or 99% over all or a portion of two polynucleotide molecules. In some embodiments, the portion of complementarity may be a region of 10, 15, 20, 25, 30, 35, 40, 45, 50, or more nucleotides. In some embodiments, the portion of complementarity between the two polynucleotide molecules is at least 60%, 65%, 70%, 75%, 80%, 85%, 90%, 95%, 97%, 98%, or 99% of the length of at least one of the two polynucleotide molecules or a functional or defined portion thereof.

[0285] As used herein, “expression” refers to the process by which polynucleotides are transcribed into mRNA and/or the process by which polynucleotides, e.g., the transcribed mRNA, are translated into peptides, polypeptides, or proteins. If the polynucleotide is derived from genomic DNA, expression may include splicing of the mRNA in a eukaryotic cell. In some embodiments, expression of a polynucleotide, e.g., a gene or a DNA encoding a protein, is determined by the amount of the protein encoded by the gene after transcription and translation of the gene. In some embodiments, expression of a polynucleotide, e.g., a gene or a DNA encoding a protein, is determined by the amount of a functional form of the protein encoded by the gene after transcription and translation of the gene. In some embodiments, expression of a gene is determined by the amount of the mRNA, or transcript, that is encoded by the gene after transcription of the gene. In some embodiments, expression of a polynucleotide, e.g., an mRNA, is determined by the amount of the protein encoded by the mRNA after translation of the mRNA. In some embodiments, expression of a polynucleotide, e.g., a mRNA or coding RNA, is determined by the amount of a functional form of the protein encoded by the polypeptide after translation of the polynucleotide.

[0286] The terms “equivalent” or “biological equivalent” are used interchangeably when referring to a particular molecule, or biological or cellular material, and means a molecule having minimal homology to another molecule while still maintaining a desired structure or functionality.

[0287] The term “encode” as it is applied to polynucleotides refers to a nucleic acid, in its native state or when manipulated by methods well known to those skilled in the art, contains the information that can be used as a template for synthesis of another nucleic acid, amino acid, or polypeptide. For example, a DNA sequence can encode a RNA sequence and can serve as the template for transcription of the RNA sequence. A RNA sequence can encode a DNA sequence and can serve as the template for reverse transcription of the DNA sequence. A DNA or RNA sequence can encode a polypeptide sequence and can contain the information for the translation template of the polypeptide sequence. In some embodiments, one or more or a few nucleotides can be said to specifically encode a mutation or a desired nucleotide edit. In some embodiments, a polynucleotide comprising three contiguous nucleotides form a codon that encodes a specific amino acid. In some embodiments, a polynucleotide comprises one or more codons that encode a polypeptide. In some embodiments, a polynucleotide comprising one or more codons comprises a mutation in a codon compared to a wild-type reference polynucleotide. In some embodiments, the mutation in the codon encodes an amino acid substitution in a polypeptide encoded by the polynucleotide as compared to a wild-type reference polypeptide.

[0288] The term “mutation” as used herein refers to a change and/or alteration in an amino acid sequence of a protein or nucleic acid sequence of a polynucleotide. Such changes and/or alterations may comprise the substitution, insertion, deletion and/or truncation of one or more amino acids, in the case of an amino acid sequence, and/or nucleotides, in the case of nucleic acid sequence, compared to a reference amino acid or nucleic acid sequence. A mutation in a polynucleotide may be insertion or expansion of one or more nucleotides, or example, expansion of three nucleotides (tri-nucleotide expansion). In some embodiments, the reference sequence is a wild-type sequence. In some embodiments, a mutation in a nucleic acid sequence of a polynucleotide encodes a mutation in the amino acid sequence of a polypeptide. In some embodiments, the mutation in the amino acid sequence of a polypeptide or the mutation in the nucleic acid sequence of a polynucleotide is a mutation associated with a disease state.

[0289] The term “subject” and its grammatical equivalents as used herein may refer to a human or a non-human. A subject may be a mammal. A human subject may be male or female. A human subject may be of any age. A subject may be a human embryo. A human subject may be a newborn, an infant, a child, an adolescent, or an adult. A human subject may be in need of treatment for a genetic disease or disorder.

[0290] The terms “treatment” or “treating” and their grammatical equivalents may refer to the medical management of a subject with an intent to cure, ameliorate, or ameliorate a symptom of, a disease, condition, or disorder. Treatment may include active treatment, that is, treatment directed specifically toward the improvement of a disease, condition, or disorder. Treatment may include causal treatment, that is, treatment directed toward removal of the cause of the associated disease, condition, or disorder. In addition, this treatment may include palliative treatment, that is, treatment designed for the relief of symptoms rather than the curing of the disease, condition, or disorder. Treatment may include supportive treatment, that is, treatment employed to supplement another specific therapy directed toward the improvement of the disease, condition, or disorder. In some embodiments, a condition may be pathological. In some embodiments, a treatment may not completely cure or prevent a disease, condition, or disorder. In some embodiments, a treatment ameliorates, but does not completely cure or prevent a disease, condition, or disorder. In some embodiments, a subject may be treated for 12 hours, 24 hours, 2 days, 3 days, 4 days, 5 days, 6 days, 7 days, 2 weeks, 3 weeks, 4 weeks, 2 months, 3 months, 4 months, 5 months, 6 months, 1 year, 2 years, 3 years, 4 years, 5 years, 6 years, indefinitely, or life of the subject.

[0291] The term “ameliorate” and its grammatical equivalents means to decrease, suppress, attenuate, diminish, arrest, or stabilize the development or progression of a disease.

[0292] The terms “prevent” or “preventing” means delaying, forestalling, or avoiding the onset or development of a disease, condition, or disorder for a period of time. Prevent also means reducing risk of developing a disease, disorder, or condition. Prevention includes minimizing or partially or completely inhibiting the development of a disease, condition, or disorder. In some embodiments, a composition, e.g., a pharmaceutical composition, prevents a disorder by delaying the onset of the disorder for 12 hours, 24 hours, 2 days, 3 days, 4 days, 5 days, 6 days, 7 days, 2 weeks, 3 weeks, 4 weeks, 2 months, 3 months, 4 months, 5 months, 6 months, 1 year, 2 years, 3 years, 4 years, 5 years, 6 years, indefinitely, or life of a subject.

[0293] The term “effective” means having the ability to produce a biological response. For example, “effective amount” or “therapeutically effective amount” may refer to a quantity of a composition, for example a composition comprising a construct, that can be sufficient to result in a desired activity upon introduction into a subject as disclosed herein. An effective amount of the prime editing compositions can be provided to the target gene or cell, whether the cell is in vitro, ex vivo or in vivo.

[0294] The amount of target gene modulation may be measured by any suitable method known in the art. In some embodiments, the “effective amount” or “therapeutically effective amount” is the amount of a composition that is required to ameliorate the symptoms of a disease relative to an untreated patient. In some embodiments, an effective amount is the amount of a composition sufficient to introduce an alteration in a gene of interest in a cell (e.g., a cell in vitro, ex vivo or in vivo).

[0295] An effective amount can be the amount to induce, when administered to a population of cells, at least about a 2-fold decrease in the number of cells that have expanded CTG repeat number in the DMPK gene. An effective amount can be the amount to induce, when administered to a population of cells, at least about a 2-fold decrease in the number of cells that have 35 or more CTG repeats in a DMPK mRNA encoded by the DMPK gene.

[0296] In some embodiments, an effective amount can be the amount to induce, for example, at least about 1.1-fold decrease, about 1.5 fold decrease, about 2-fold decrease, about 3-fold decrease, about 4-fold decrease, about 5-fold decrease, about 6-fold decrease, about 7-fold decrease, about 8-fold decrease, about 9-fold decrease, about 10-fold decrease, about 25-fold decrease, about 50-fold decrease, about 100-fold decrease, about 200-fold decrease, about 500-fold decrease, about 700-fold decrease, about 1000-fold decrease, about 5000-fold decrease, or about 10,000-fold decrease in the amount of DMPK transcripts having 35 or more CTG repeats.

[0297] The term “construct” refers to a polynucleotide or a portion of a polynucleotide, comprising one or more nucleic acid sequences encoding one or more transcriptional products and/or proteins. A construct may be a recombinant nucleic acid molecule or a part thereof. In some embodiments, the one or more nucleic acid sequences of a construct are operably linked to one or more regulatory sequences, for example, transcriptional initiation regulatory sequences. In some embodiments, a construct is a vector, a plasmid, or a portion thereof. In some embodiments, a construct comprises DNA. In some embodiments, a construct comprises RNA. In some embodiments, a construct is double stranded. In some embodiments, a construct is single stranded. In some embodiments, a construct comprises an expression cassette. An expression cassette means a polynucleotide comprising a nucleic acid sequence that encodes one or more transcriptional products and is operably linked to at least one transcriptional regulatory sequence, e.g., a promoter.

[0298] The term “exogenous” when used in reference to a biomolecule, e.g., a polynucleotide sequence or a polypeptide sequence refers to a biomolecule that is not native to a specific biological context, e.g., a gene, a particular chromosome, a particular cell or chromosomal site of the cell, tissue, or organism, or, if from the same source, is modified from its original form or is present in a non-native location, e.g., a chromosome location.

[0299] The term “endogenous” when used in reference to a biomolecule, e.g., a polynucleotide sequence or a polypeptide sequence refers to a biomolecule that is native to or naturally occurring in a specific biological context, e.g., a gene, a particular chromosome, a particular cell or chromosomal site of the cell, tissue, or organism. For example, an endogenous sequence may be a wild type sequence or may comprise one or more mutations compared to a wild type sequence. In some embodiments, an endogenous sequence is mutated compared to a wild type sequence and may cause or be associated with a disease or disorder in a subject. As used herein, in some embodiments, a wild type sequence, with respect to a specific gene and a specific disease, is a gene sequence found in healthy individuals, wherein the wild-type sequence does not include a mutation causative of the specific disease. In some embodiments, in the context of repeat expansion disease, a wild type sequence may be used to refer to a sequence that harbors an array of a specific tri-nucleotide repeats within a normal range. For example, in some embodiments, the tri-nucleotide repeat is a CTG repeat in a DMPK gene, and a wild type sequence of a DMPK gene may have 5 to 34 CTG repeats.

[0300] A “repeat expansion disorder” or “trinucleotide repeat disorder” or “expansion repeat disorder” refers to a set of genetic disorders which are caused by “trinucleotide repeat expansion,” which is a kind of mutation characterized by expanded number of repeats of a contiguous array of three nucleotides each having the same sequence, referred to as “trinucleotide repeats” or “triplet repeats”). As used herein, an array of tri-nucleotide repeats means at least two contiguous tri-nucleotides that are the same. In some embodiments, an array of tri-nucleotide repeats comprises 2, 3, 4, 5, 6, 7, 8, 9, 10, 11, 12, 13, 14, 15, 16, 17, 18, 19, 20, 21, 22, 23, 24, 25, 26, 27, 28, 29, 30, 31, 32, 33, 34, 35, 36, 37, 38, 39, 40, 41, 42, 43, 44, 45, 46, 47, 48, 49, 50, 51, 52, 53, 54, 55, 56, 57, 58, 59, 60, 61, 62, 63, 64, 65, 66, 67, 68, 69, 70, 71, 72, 73, 74, 75, 76, 77, 78, 79, 80, 81, 82, 83, 84, 85, 86, 87, 88, 89, 90, 91, 92, 93, 94, 95, 96, 97, 98, 99, 100, 101, 102, 103, 104, 105, 106, 107, 108, 109, 110, 111, 112, 113, 114, 115, 116, 117, 118, 119, 120, 121, 122, 123, 124, 125, 126, 127, 128, 129, 130, 131, 132, 133, 134, 135, 136, 137, 138, 139, 140, 141, 142, 143, 144, 145, 146, 147, 148, 149, 150, 151, 152, 153, 154, 155, 156, 157, 158, 159, 160, 161, 162, 163, 164, 165, 166, 167, 168, 169, 170, 171, 172, 173, 174, 175, 176, 177, 178, 179, 180, 181, 182, 183, 184, 185, 186, 187, 188, 189, 190, 191, 192, 193, 194, 195, 196, 197, 198, 199, or 200 repeats of the same tri-nucleotides. In some embodiments, an array of tri-nucleotide repeats comprises at least 100, 150, 200, 250, 300, 350, 400, 450, 500, 550, 600, 650, 700, 750, 800, 850, 900, 950, 1000, 1050, 1100, 1150, 1200, 1250, 1300, 1350, 1400, 1450, or 1500 repeats of the same tri-nucleotides. In some embodiments, an array of tri-nucleotide repeats comprises about 50 to 100, about 100 to 150, about 150 to 200, about 200 to 250, about 250 to 300, about 300 to 400, about 400 to 500, about 500 to 600, about 600 to 700, about 700 to 800, about 800 to 900, about 900 to 1000 repeats of the same tri-nucleotides. In some embodiments, an array of tri-nucleotide repeats comprises more than 1000 repeats of the same tri-nucleotides. In some embodiments, an array of tri-nucleotide repeats comprises about 5 to 10, 5 to 15, 5 to 20, 5 to 25, 5 to 30, 5 to 35, 5 to 40, 5 to 45, 5 to 50, 10 to 15, 10 to 20, 10 to 25, 10 to 30, 10 to 35, 10 to 40, 10 to 45, 10 to 50, 15 to 20, 15 to 25, 15 to 30, 15 to 35, 15 to 40, 15 to 45, 15 to 50, 20 to 25, 20 to 30, 20 to 35, 20 to 40, 20 to 45, 20 to 50, 25 to 30, 25 to 35, 25 to 40, 25 to 45, 25 to 50, 30 to 35, 30 to 40, 30 to 45, 30 to 50, 35 to 40, 35 to 45, 35 to 50, 40 to 45, 40 to 50, or 45 to 50 repeats of the same tri-nucleotides. In some embodiments, an array of tri-nucleotide repeats is in a non-coding region of a gene, for example, a 3′ UTR, a 5′ UTR, or an intron of a gene. In some embodiments, an array of tri-nucleotide repeats is in a regulatory sequence, e.g., a promoter, of a gene. In some embodiments, an array of tri-nucleotide repeats is in an upstream sequence or a downstream sequence of a gene. In some embodiments, an array of tri-nucleotide repeats is in a coding region of a gene. In some embodiments, an array of tri-nucleotide repeats encodes an array of amino acid repeats. In some embodiments, the number of repeats of the same tri-nucleotides in an array of tri-nucleotide repeats is altered as compared to the number of repeats in a reference array of tri-nucleotide repeats, for example, the number of repeats in a wild type gene sequence. In some embodiments, the number of repeats of the same tri-nucleotides in an array of tri-nucleotide repeats is increased as compared to the number of repeats in a reference array of tri-nucleotide repeats, for example, the number of repeats in a wild type gene sequence. In some embodiments, the altered or increased number of repeats in an array of tri-nucleotide repeats compared to the number of the same repeats in a wild type gene sequence is associated with a disease.

### Dual Prime Editing

[0301] In some embodiments, prime editing may comprise programmable editing of a target DNA using one or more prime editors each complexed with a PEgRNA (“dual prime editing”). Dual prime editing refers to programmable editing of a double stranded target DNA using two or more PEgRNAs, each of which is complexed with a prime editor for incorporating one or more intended nucleotide edits into the double stranded target DNA. In some embodiments, dual prime editing incorporates one or more intended nucleotide edits into a double stranded target DNA through excision of an endogenous DNA segment and/or replacement of the endogenous DNA segment with newly synthesized DNA via target-primed DNA synthesis. In some embodiments, dual prime editing may be used to edit a target DNA that is or is part of a target gene. In some embodiments, the target gene is a disease-associated gene. In some embodiments, the target gene is a monogenic disease-associated gene. In some embodiments, the target gene is a polygenic disease-associated gene. In some embodiments, the target gene is mutated compared to a wild-type sequence of the same gene and may cause or be associated with a disease or disorder in a subject. In some embodiments, the mutated target gene causes a disease or a disorder in a human subject.

[0302] The term “prime editing” refers to programmable editing of a target DNA using a prime editor complexed with a PEgRNA to incorporate an intended nucleotide edit into the target DNA through target-primed DNA synthesis. In prime editing, a target DNA may comprise a double stranded DNA molecule having two complementary strands. When viewed in the context of each specific PEgRNA, the two complementary strands of a double stranded target DNA may comprise a strand that may be referred to as a “target strand” or a “non-edit strand”, and a complementary strand that may be referred to as a “non-target strand,” or an “edit strand.” In some embodiments, in a prime editing guide RNA (PEgRNA), a spacer sequence is complementary or substantially complementary to a specific sequence on the target strand, which may be referred to as a “search target sequence”. In some embodiments, the spacer sequence anneals with the target strand at the search target sequence. The target strand may also be referred to as the “non-Protospacer Adjacent Motif (non-PAM strand).” In some embodiments, the non-target strand may also be referred to as the “PAM strand”. In some embodiments, the PAM strand comprises a protospacer sequence and optionally a PAM sequence. A protospacer sequence refers to a specific sequence in the PAM strand of the target gene that is complementary to the search target sequence. In a PEgRNA, a spacer sequence may have a substantially identical sequence as the protospacer sequence on the edit strand of a target gene, except that the spacer sequence may comprise Uracil (U) and the protospacer sequence may comprise Thymine (T).

[0303] In some embodiments, dual prime editing involves using two different PEgRNAs each complexed with a prime editor, wherein each of the two PEgRNAs comprises a spacer complementary or substantially complementary to a separate search target sequence. In some embodiments, each of the two PEgRNAs anneals with a separate search target sequence through its spacer. Accordingly, references to a “PAM strand”, a “non-PAM strand”, a “target strand’, a “non-target strand”, an “edit strand” or a “non-edit strand” are relative in the context of a specific PEgRNA, e.g., one of the two PEgRNAs in dual prime editing.

[0304] In some embodiments, dual prime editing involves two PEgRNAs, different from one another, each complexed with a prime editor. In some embodiments, each of the two PEgRNAs comprises a region of complementarity to a distinct search target sequence of the target DNA, wherein the two distinct search target sequences are on the two complementary strands of the target DNA. The terms “region”, “portion”, and “segment” are used interchangeably to refer to a proportion of a molecule, for example, a polynucleotide or a polypeptide. For example, a region of a polynucleotide may be 5%, 10%, 15%, 20%, 25%, 30%, 35%, 40%, 45%, 50%, 55%, 60%, 65%, 70%, 75%, 80%, 85%, 90%, 95% or 100% of the polynucleotide. In some embodiments, the two PEgRNAs each can direct a prime editor to initiate the prime editing process on the two complementary strands of the target DNA.

[0305] In some embodiments, dual prime editing involves two PEgRNAs each complexed with a prime editor. In some embodiments, a first PEgRNA comprises a first spacer complementary to a first search target sequence on a first strand of a double stranded target DNA, e.g., a double stranded target gene. In the context of the first PEgRNA, the first strand of the double stranded target DNA may be referred to as a first target strand, and the complementary strand referred to as the first PAM strand.

[0306] In some embodiments, a second PEgRNA comprises a second spacer complementary to a second search target sequence on a second strand of the double stranded target DNA. In some embodiments, the first strand and the second strand of the double stranded target DNA, e.g., a double stranded target gene, are complementary to each other. Accordingly, in some embodiments, the second PEgRNA and the first PEgRNA bind opposite strands of the double stranded target DNA. In the context of the second PEgRNA, the second strand of the double stranded target DNA may be referred to as a second target strand, and the complementary strand referred to as the second PAM strand. In some embodiments, the first target strand is the same strand as the second PAM strand of the double stranded target DNA. In some embodiments, the second target strand is the same strand as the first PAM strand of the double stranded target DNA.

[0307] As used herein for editing of the DMPK gene, the first PEgRNA may also be referred to as the “5′ PEgRNA”, and the second PEgRNA may be referred to as the “3′ PEgRNA”. Specifically, the 5′ to 3′ orientation of the DMPK gene refers to the 5′ to 3′ orientation of the coding strand (i.e. sense strand) of the DMPK gene. The first PEgRNA (5′ PEgRNA) comprises a first spacer having complementarity to a first search target sequence on the non-coding strand of DMPK, and is capable of directing a prime editor to nick the coding strand at a first nick site that is 5′ to the CTG repeats. The second PEgRNA (3′ PEgRNA) comprises a second spacer having complementarity to a second search target sequence on the coding strand of DMPK, and is capable of directing a prime editor to nick the non-coding strand at a second nick site that is 5′ to the CAG repeats (that is, the position corresponding to the second nick site on the coding strand is 3′ to the CTG repeats). An exemplary dual prime editing strategy for editing the DMPK gene is provided in FIG. 4A, where the first strand (bottom) is the non-coding strand, and the second strand (top) is the coding strand. The (CTG) repeats are accordingly in the coding strand, and the non-coding strand contains the complementary (CAG) repeats. A 5′ PEgRNA complexed with a prime editor is at the left side of the figure, and a 3′ PEgRNA complexed with a prime editor is at the right side.

[0308] In some embodiments, the first PEgRNA anneals with the first target strand of the double stranded target DNA, through the first spacer of the first PEgRNA. In some embodiments, the first PEgRNA complexes with and directs a first prime editor to bind the double stranded target DNA at the position corresponding to the first search target sequence. In some embodiments, the second PEgRNA anneals with the second search target sequence on the second target strand of the double stranded target DNA, through a second spacer of the second PEgRNA. In some embodiments, the second PEgRNA complexes with and directs a second prime editor to bind the double stranded target DNA at the position corresponding to the second search target sequence. In some embodiments, the first prime editor and the second prime editor are the same. In some embodiments, the first prime editor and the second prime editor are different.

[0309] In some embodiments, the first search target sequence recognized by the spacer of the first PEgRNA and the second search target sequence recognized by the spacer of the second PEgRNA have a region of complementarity to each other. In some embodiments, the region of complementarity is 2 to 20 nucleotides in length. In some embodiments, the region of complementarity is 5 to 15 nucleotides in length.

[0310] In some embodiments, the first search target sequence recognized by the spacer of the first PEgRNA and the second search target sequence recognized by the spacer of the second PEgRNA do not have a region of complementarity to each other. In some embodiments, the positions of the first and second search target sequences relative to each other may be determined by their positions in the double stranded target DNA prior to editing. In some embodiments, the positions of the first and second search target sequences relative to each other may be determined by their positions in a reference double stranded target DNA.

[0311] In some embodiments, the 3′ end of the first search target sequence and the position corresponding to the 3′ end of the second search target sequence are 2, 3, 4, 5, 6, 7, 8, 9, 10, 11, 12, 13, 14, 15, 16, 17, 18, 19, 20, 21, 22, 23, 24, 25, 26, 27, 28, 29, 30, 31, 32, 33, 34, 35, 36, 37, 38, 39, 40, 41, 42, 43, 44, 45, 46, 47, 48, 49, 50, 51, 52, 53, 54, 55, 56, 57, 58, 59, 60, 61, 62, 63, 64, 65, 66, 67, 68, 69, 70, 71, 72, 73, 74, 75, 76, 77, 78, 79, 80, 81, 82, 83, 84, 85, 86, 87, 88, 89, 90, 91, 92, 93, 94, 95, 96, 97, 98, 99, or 100 nucleotides apart from each other. In some embodiments, the 3′ end of the first search target sequence and the position corresponding to the 3′ end of the second search target sequence are about 110, 120, 130, 140, 150, 160, 170, 180, 190, 200, 210, 220, 230, 240, 250, 260, 270, 280, 290, 300, 310, 320, 330, 340, 350, 360, 370, 380, 390, 400, 410, 420, 430, 440, 450, 460, 470, 480, 490, or 500 nucleotides apart from each other. In some embodiments, the 3′ end of the first search target sequence and the position corresponding to the 3′ end of the second search target sequence are about 500, 600, 700, 800, 900, 1000, 1100, 1200, 1300, 1400, 1500, 1600, 1700, 1800, 1900, 2000 or more nucleotides apart from each other. In some embodiments, the 3′ end of the first search target sequence and the position corresponding to the 3′ end of the second search target sequence are about 150 to about 450 nucleotides apart from each other. In some embodiments, the 3′ end of the first search target sequence and the position corresponding to the 3′ end of the second search target sequence are about 105 to about 145 nucleotides apart from each other. In some embodiments, the 3′ end of the first search target sequence and the position corresponding to the 3′ end of the second search target sequence are about 300 to about 3000 nucleotides apart from each other. In some embodiments, the 3′ end of the first search target sequence and the position corresponding to the 3′ end of the second search target sequence at least about 3000 nucleotides apart from each other.

[0312] In some embodiments, the bound first prime editor generates a first nick on the first PAM strand of the double stranded target DNA. In some embodiments, a first PEgRNA comprises a first primer binding site (PBS, also referred to herein as “primer binding site sequence”) that is complementary to the sequence of the first PAM strand of the double stranded target DNA that is immediately upstream of the first nick site, and can anneal with the sequence of the first PAM strand at a free 3′ end formed at the first nick site. In some embodiments, a first PEgRNA comprises a first primer binding site (PBS) that anneals to a free 3′ end formed at the first nick site and the first prime editor initiates DNA synthesis from the nick site, using the free 3′ end as a primer. In some embodiments, the first prime editor generates a first newly synthesized single stranded DNA encoded by a first editing template of the first PEgRNA.

[0313] In some embodiments, the bound second prime editor generates a second nick on the second PAM strand of the double stranded target DNA. In some embodiments, the double stranded target DNA, e.g., a target gene, comprises a double stranded DNA sequence between the first nick generated by the first prime editor on the second target strand (also referred to as the first PAM strand) and the second nick generated by the second prime editor on the first target strand (also referred to as the second PAM strand), which may be referred to as an inter-nick duplex (IND). In some embodiments, the two strands of an IND are perfectly complementary to each other. In some embodiments, the two strands of an IND are partially complementary to each other. In some embodiments, the IND is subsequently excised from the double stranded target DNA, e.g., the target gene.

[0314] In some embodiments, the IND is 1, 2, 3, 4, 5, 6, 7, 8, 9, 10, 11, 12, 13, 14, 15, 16, 17, 18, 19, 20 or more base pairs in length. In some embodiments, the IND is up to 5, up to 10, up to 15, up to 20, up to 25, up to 30, up to 40, or up to 50 base pairs in length. In some embodiments, the IND is 1-3000, 1-2500, 1-2000, 1-1500, 1-1000, 1-900, 1-800, 1-700, 1-600, 1-500, 1-400, 1-300, 1-200, 1-100, 1-50, 1-40, 1-30, 1-25, 1-20, 1-15, 1-10, or 1-5 base pairs in length. In some embodiments, the IND is 500-3000, 500-2500, 500-2000, 500-1500, 500-1000, 500-900, 500-800, 500-700, or 500-600 base pairs in length. In some embodiments, the IND is 30-300, 30-250, 30-200, 30-150, 30-100, 30-75, 30-50, 50-200, 50-150, 50-100, 50-75, 75-100, 75-150, 75-200, 75-250, 75-300 base pairs in length. In some embodiments, the IND is 1-3, 1-6, 1-9, 1-12, 1-15, 1-18, 1-21, 1-24, 1-27, 1-30, 1-36, 1-45, 1-60, 1-72, 1-90, 3-6, 3-9, 3-12, 3-15, 3-18, 3-21, 3-24, 3-27, 3-30, 3-36, 3-45, 3-60, 3-72, 3-90, 6-9, 6-12, 6-15, 6-18, 6-21, 6-24, 6-27, 6-30, 6-36, 6-45, 6-60, 6-72, 6-90, 9-12, 9-15, 9-18, 9-21, 9-24, 9-27, 9-30, 9-36, 9-45, 9-60, 9-72, 9-90, 12-15, 12-18, 12-21, 12-24, 12-27, 12-30, 12-36, 12-45, 12-60, 12-72, 12-90, 15-18, 15-21, 15-24, 15-27, 15-30, 15-36, 15-45, 15-60, 15-72, 15-90, 18-21, 18-24, 18-27, 18-30, 18-36, 18-45, 18-60, 18-72, 18-90, 21-24, 21-27, 21-30, 21-36, 21-45, 21-60, 21-72, 21-90, 24-27, 24-30, 24-36, 24-45, 24-60, 24-72, 24-90, 27-30, 27-36, 27-45, 27-60, 27-72, 27-90, 30-36, 30-45, 30-60, 30-72, 30-90, 45-60, 45-72, 60-72, 60-90, or 72-90 base pairs in length. In some embodiments, the IND is 1-3000, 1-2500, 1-2000, 1-1500, 1-1000, 1-900, 1-800, 1-700, 1-600, 1-500, 1-400, 1-300, 1-200, 1-100, 1-50, 1-40, 1-30, 1-25, 1-20, 1-15, 1-10, 1-5, 500-3000, 500-2500, 500-2000, 500-1500, 500-1000, 500-900, 500-800, 500-700, 500-600, 30-300, 30-250, 30-200, 30-150, 30-100, 30-75, 30-50, 50-200, 50-150, 50-100, 50-75, 75-100, 75-150, 75-200, 75-250, or 75-300 base pairs in length. In some embodiments, the IND is 1-3, 1-6, 1-9, 1-12, 1-15, 1-18, 1-21, 1-24, 1-27, 1-30, 1-36, 1-45, 1-60, 1-72, 1-90, 3-6, 3-9, 3-12, 3-15, 3-18, 3-21, 3-24, 3-27, 3-30, 3-36, 3-45, 3-60, 3-72, 3-90, 6-9, 6-12, 6-15, 6-18, 6-21, 6-24, 6-27, 6-30, 6-36, 6-45, 6-60, 6-72, 6-90, 9-12, 9-15, 9-18, 9-21, 9-24, 9-27, 9-30, 9-36, 9-45, 9-60, 9-72, 9-90, 12-15, 12-18, 12-21, 12-24, 12-27, 12-30, 12-36, 12-45, 12-60, 12-72, 12-90, 15-18, 15-21, 15-24, 15-27, 15-30, 15-36, 15-45, 15-60, 15-72, 15-90, 18-21, 18-24, 18-27, 18-30, 18-36, 18-45, 18-60, 18-72, 18-90, 21-24, 21-27, 21-30, 21-36, 21-45, 21-60, 21-72, 21-90, 24-27, 24-30, 24-36, 24-45, 24-60, 24-72, 24-90, 27-30, 27-36, 27-45, 27-60, 27-72, 27-90, 30-36, 30-45, 30-60, 30-72, 30-90, 45-60, 45-72, 60-72, 60-90, or 72-90 base pairs in length. In some embodiments, the IND is about 150 to about 450 base pairs in length. In some embodiments, the IND is about 105 to about 145 base pairs in length. In some embodiments, the IND is about 300 to about 3000 base pairs in length. In some embodiments, the IND is more than about 3000 base pairs in length.

[0315] In some embodiments, the double stranded target DNA is a double stranded target gene or a part of a double stranded target gene, and the IND comprises a part of a coding sequence of the target gene. In some embodiments, the IND comprises a part of a non-coding sequence of the target gene. In some embodiments, the IND comprises a part of an exon. In some embodiments, the IND comprises an entire exon. In some embodiments, the IND comprises a part of an intron. In some embodiments, the IND comprises an entire intron. In some embodiments, the IND comprises a 3′ UTR sequence of the target gene. In some embodiments, the IND comprises a 5′ UTR sequence of the target gene. In some embodiments, the IND comprises a whole or a part of an ORF of the target gene. In some embodiments, the IND comprises both coding and non-coding sequences of the target gene. In some embodiments, the IND comprises both intron and exon sequences of the target gene. For example, in some embodiments, the IND comprises the sequence of an exon flanked by an intronic sequence at the 5′ end, the 3′ end, or both ends. In some embodiments, the IND comprises one or more exons and intervening introns. In some embodiments, the IND comprises two or more exons and intervening introns. In some embodiments, the IND comprises all of the coding regions of a target gene, regulatory sequences of a target gene, or the entire target gene comprising its exons, introns and regulatory sequences. In some embodiments, the double stranded DNA comprises a gene or a part of a gene, and the IND comprises one or more mutations compared to a wild type reference sequence of the same gene. In some embodiments, the one or more mutations are associated with a disease. In some embodiments, the IND comprises an array of three nucleotide repeats (or tri-nucleotide repeats). In some embodiments, the IND comprises an array of tri-nucleotide repeats, wherein the number of the tri-nucleotide repeats is associated with a disease. As used herein, an array of tri-nucleotide repeats means at least two tri-nucleotides that are the same. In some embodiments, an array of tri-nucleotide repeats comprises at least 10, 20, 30, 50, 100, 150, 200, 250, 300, 350, 400, 450, 500, 550, 600, 650, 700, 750, 800, 850, 900, 950, 1000, 1050, 1100, 1150, 1200, 1250, 1300, 1350, 1400, 1450, or 1500 repeats of the same tri-nucleotides. In some embodiments, an array of tri-nucleotide repeats comprises at least 34 tri-nucleotide repeats. In some embodiments, an array of tri-nucleotide repeats comprises at least 50 tri-nucleotide repeats. In some embodiments, an array of tri-nucleotide repeats comprises at least 100 tri-nucleotide repeats. In some embodiments, an array of tri-nucleotide repeats comprises at least 1000 tri-nucleotide repeats. In some embodiments, an array of tri-nucleotide repeats is in a non-coding region of a gene, for example, a 3′ UTR, of a gene. In some embodiments, the array of tri-nucleotide repeats is an array of CTG (or the reverse complement CAG) repeats.

[0316] In some embodiments, a first PEgRNA comprises a first primer binding site (PBS) that is complementary to a free 3′ end of the second strand of the double stranded target DNA formed at the first nick site. In some embodiments, the first PBS anneals with the free 3′ end formed at the first nick site, and the first prime editor initiates DNA synthesis from the first nick site, using the free 3′ end at the first nick site as a primer. In some embodiments, the first prime editor synthesizes a first new single stranded DNA encoded by the first editing template of the first PEgRNA. In some embodiments, the second PEgRNA comprises a second PBS that is complementary to a free 3′ end of the first strand of the double stranded target DNA formed at the second nick site. In some embodiments, the second PBS anneals with the free 3′ end formed at the second nick site, and the second prime editor initiates DNA synthesis from the nick site, using the free 3′ end at the second nick site as a primer. In some embodiments, the second prime editor synthesizes a second newly synthesized single stranded DNA encoded by a second editing template of the second PEgRNA.

[0317] In some embodiments, through DNA repair, the sequence of the first newly synthesized single stranded DNA encoded by the first editing template and/or the sequence of the second newly synthesized single stranded DNA encoded by the second editing template is incorporated into the double stranded target DNA, e.g., a target gene, thereby incorporating one or more intended nucleotide edits in the double stranded target DNA, e.g., the target gene.

[0318] As used herein, a “nucleotide edit” or an “intended nucleotide edit” refers to a specified edit of a double stranded target DNA. A nucleotide edit or intended nucleotide edit refers to a (i) deletion of one or more contiguous nucleotides at one specific position, (ii) insertion of one or more contiguous nucleotides at one specific position, (iii) substitution of one or more contiguous nucleotides, or (iv) a combination of contiguous nucleotide substitutions, insertions and/or deletions of two or more contiguous nucleotides at one specific position, or other alterations at one specific position to be incorporated into the sequence of the double stranded target DNA. An intended nucleotide edit may refer to the edit on an editing template (e.g., a first editing template or a second editing template) as compared to the sequence of the double stranded target gene, or may refer to the edit encoded by an editing template in the newly synthesized single stranded DNA that is incorporated in the double stranded target DNA, e.g., the DMPK gene, as compared to endogenous sequence of the double stranded target DNA, e.g., the DMPK gene. In some embodiments, an intended nucleotide edit may also refer to the edit that results from incorporation of the newly synthesized DNA encoded by an editing template, or incorporation of the two newly synthesized single stranded DNA encoded by each of the first PEgRNA and the second PEgRNA in dual prime editing.

[0319] In some embodiments, the sequence of the first newly synthesized single stranded DNA and/or the sequence of the second newly synthesized single stranded DNA are incorporated into the double stranded target DNA, e.g., the target gene. In some embodiments, the first and/or the second newly synthesized single stranded DNAs comprises one or more intended nucleotide edits compared to the endogenous sequence of the double stranded target DNA, e.g., the target gene, which are incorporated in the double stranded target DNA, e.g., the target gene. In some embodiments, the sequence of the first newly synthesized single stranded DNA encoded by the first editing template is incorporated in the double stranded target DNA, e.g., the target gene, thereby incorporating one or more intended nucleotide edits in the double stranded target DNA, e.g., the target gene. In some embodiments, the sequence of the second newly synthesized single stranded DNA encoded by the second editing template is incorporated in the double stranded target DNA, e.g., the target gene, thereby incorporating one or more intended nucleotide edits in the double stranded target DNA, e.g., the target gene. In some embodiments, the sequence of the first newly synthesized single stranded DNA encoded by the first editing template and the sequence of the second newly synthesized single stranded DNA encoded by the second editing template are incorporated in the double stranded target DNA, e.g., the target gene, thereby incorporating one or more intended nucleotide edits in the double stranded target DNA, e.g., the target gene.

[0320] In some embodiments, the intended nucleotide edit comprises an insertion, deletion, nucleotide substitution, inversion, or any combination thereof compared to the endogenous sequence of the double stranded target DNA, e.g., the target gene. In some embodiments, the intended nucleotide edit comprises 1, 2, 3, 4, 5, 6, 7, 8, 9, 10, 11, 12, 13, 14, 15, 16, 17, 18, 19, 20 or more nucleotide substitutions compared to the endogenous sequence of the double stranded target DNA, e.g., the target gene. In some embodiments, the intended nucleotide edit comprises up to 5, up to 10, up to 15, up to 20, up to 25, up to 30, up to 40, or up to 50 nucleotide substitutions compared to the endogenous sequence of the double stranded target DNA, e.g., the target gene. In some embodiments, the intended nucleotide edit comprises 1-50, 1-40, 1-30, 1-25, 1-20, 1-15, 1-10, or 1-5 nucleotide substitutions compared to the endogenous sequence of the double stranded target DNA, e.g., the target gene. In some embodiments, the intended nucleotide edit comprises 3-50, 3-40, 3-30, 3-25, 3-20, 3-15, 3-10, or 3-5 nucleotide substitutions compared to the endogenous sequence of the double stranded target DNA, e.g., the target gene. In some embodiments, the intended nucleotide edit comprises 5-50, 5-40, 5-30, 5-25, 5-20, 5-15, or 5-10 nucleotide substitutions compared to the endogenous sequence of the double stranded target DNA, e.g., the target gene.

[0321] In some embodiments, the intended nucleotide edit comprises 1, 2, 3, 4, 5, 6, 7, 8, 9, 10, 11, 12, 13, 14, 15, 16, 17, 18, 19, 20 or more nucleotide insertions compared to the endogenous sequence of the double stranded target DNA, e.g., the target gene. In some embodiments, the intended nucleotide edit comprises up to 5, up to 10, up to 15, up to 20, up to 25, up to 30, up to 40, or up to 50 nucleotide insertions compared to the endogenous sequence of the double stranded target DNA, e.g., the target gene. In some embodiments, the intended nucleotide edit comprises single nucleotide insertions at 1, 2, 3, 4, 5, 6, 7, 8, 9, 10, 11, 12, 13, 14, 15, 16, 17, 18, 19, 20 or more sites in the double stranded target DNA compared to the endogenous sequence of the double stranded target DNA, e.g., the target gene. In some embodiments, the intended nucleotide edit comprises nucleotide insertions of greater than one nucleotide at each site in the double stranded target DNA compared to the endogenous sequence of the double stranded target DNA, e.g., the target gene. As used herein, “site” refers to a specific position in the sequence of a target DNA, e.g., a target gene. In some embodiments, the specific position in the sequence of the double stranded target DNA, e.g., a target gene, can be referred to by specific positions in a reference sequence, e.g., a wild type gene sequence. In some embodiments, a nucleotide insertion at position x refers to insertion of one or more nucleotides between position x and position x+1 as set forth by numbering in a reference sequence. In some embodiments, a nucleotide deletion at position x refers to deletion of the specific nucleotide at position x as set forth by numbering in a reference sequence. In some embodiments, a nucleotide deletion of positions x to x+n refers to deletion of the specific nucleotides starting at nucleotide x to nucleotide x+n, including nucleotide x and nucleotide x+n, as set forth by numbering in a reference sequence. In some embodiments, a nucleotide inversion of positions x to x+n refers to inversion of the specific nucleotides starting at nucleotide x to nucleotide x+n, including nucleotide x and nucleotide x+n, as set forth by numbering in a reference sequence.

[0322] In some embodiments, the intended nucleotide edit comprises nucleotide insertions of greater than one nucleotide at 1, 2, 3, 4, 5, 6, 7, 8, 9, 10, 11, 12, 13, 14, 15, 16, 17, 18, 19, 20 or more sites in the double stranded target DNA compared to the endogenous sequence of the double stranded target DNA, e.g., the target gene. In some embodiments, the intended nucleotide edit comprises 1-3000, 1-2500, 1-2000, 1-1500, 1-1000, 1-900, 1-800, 1-700, 1-600, 1-500, 1-400, 1-300, 1-200, 1-100, 1-50, 1-40, 1-30, 1-25, 1-20, 1-15, 1-10, or 1-5 nucleotide insertions compared to the endogenous sequence of the double stranded target DNA, e.g., the target gene. In some embodiments, the intended nucleotide edit comprises 500-3000, 500-2500, 500-2000, 500-1500, 500-1000, 500-900, 500-800, 500-700, or 500-600 nucleotide insertions compared to the endogenous sequence of the double stranded target DNA, e.g., the target gene. In some embodiments, the intended nucleotide edit comprises 30-300, 30-250, 30-200, 30-150, 30-100, 30-75, 30-50, 50-200, 50-150, 50-100, 50-75, 75-100, 75-150, 75-200, 75-250, or 75-300 nucleotide insertions compared to the endogenous sequence of the double stranded target DNA, e.g., the target gene. In some embodiments, the intended nucleotide edit comprises nucleotide insertions of 1-3000, 1-2500, 1-2000, 1-1500, 1-1000, 1-900, 1-800, 1-700, 1-600, 1-500, 1-400, 1-300, 1-200, 1-100, 1-50, 1-40, 1-30, 1-25, 1-20, 1-15, 1-10, 1-5, 500-3000, 500-2500, 500-2000, 500-1500, 500-1000, 500-900, 500-800, 500-700, 500-600, 30-300, 30-250, 30-200, 30-150, 30-100, 30-75, 30-50, 50-200, 50-150, 50-100, 50-75, 75-100, 75-150, 75-200, 75-250, or 75-300 nucleotides at each site in the double stranded target DNA compared to the endogenous sequence of the double stranded target DNA, e.g., the target gene.

[0323] In some embodiments, the intended nucleotide edit comprises 1, 2, 3, 4, 5, 6, 7, 8, 9, 10, 11, 12, 13, 14, 15, 16, 17, 18, 19, 20 or more nucleotide deletions compared to the endogenous sequence of the double stranded target DNA, e.g., the target gene. In some embodiments, the intended nucleotide edit comprises up to 5, up to 10, up to 15, up to 20, up to 25, up to 30, up to 40, or up to 50 nucleotide deletions compared to the endogenous sequence of the double stranded target DNA, e.g., the target gene. In some embodiments, the intended nucleotide edit comprises single nucleotide deletions at 1, 2, 3, 4, 5, 6, 7, 8, 9, 10, 11, 12, 13, 14, 15, 16, 17, 18, 19, 20 or more sites in the double stranded target DNA compared to the endogenous sequence of the double stranded target DNA, e.g., the target gene. In some embodiments, the intended nucleotide edit comprises nucleotide deletions of greater than one nucleotide at each site in the double stranded target DNA compared to the endogenous sequence of the double stranded target DNA, e.g., the target gene. In some embodiments, the intended nucleotide edit comprises nucleotide deletions of greater than one nucleotide at 1, 2, 3, 4, 5, 6, 7, 8, 9, 10, 11, 12, 13, 14, 15, 16, 17, 18, 19, 20 or more sites in the double stranded target DNA compared to the endogenous sequence of the double stranded target DNA, e.g., the target gene. In some embodiments, the intended nucleotide edit comprises 1-3000, 1-2500, 1-2000, 1-1500, 1-1000, 1-900, 1-800, 1-700, 1-600, 1-500, 1-400, 1-300, 1-200, 1-100, 1-50, 1-40, 1-30, 1-25, 1-20, 1-15, 1-10, or 1-5 nucleotide deletions compared to the endogenous sequence of the double stranded target DNA, e.g., the target gene. In some embodiments, the intended nucleotide edit comprises 500-3000, 500-2500, 500-2000, 500-1500, 500-1000, 500-900, 500-800, 500-700, or 500-600 nucleotide deletions compared to the endogenous sequence of the double stranded target DNA, e.g., the target gene. In some embodiments, the intended nucleotide edit comprises 30-300, 30-250, 30-200, 30-150, 30-100, 30-75, 30-50, 50-200, 50-150, 50-100, 50-75, 75-100, 75-150, 75-200, 75-250, 75-300 nucleotide deletions compared to the endogenous sequence of the double stranded target DNA, e.g., the target gene. In some embodiments, the intended nucleotide edit comprises deletion of about 105-145 nucleotides at a site of the target gene, e.g., the DMPK gene. In some embodiments, the intended nucleotide edit comprises deletion of about 150-450 nucleotides at a site of the target gene, e.g., the DMPK gene. In some embodiments, the intended nucleotide edit comprises deletion of about 300-3000 nucleotides at a site of the target gene, e.g., the DMPK gene. In some embodiments, the intended nucleotide edit comprises deletion of more than about 3000 nucleotides at a site of the target gene, e.g., the DMPK gene.

[0324] In some embodiments, the intended nucleotide edit comprises 1-3, 1-6, 1-9, 1-12, 1-15, 1-18, 1-21, 1-24, 1-27, 1-30, 1-36, 1-45, 1-60, 1-72, 1-90, 3-6, 3-9, 3-12, 3-15, 3-18, 3-21, 3-24, 3-27, 3-30, 3-36, 3-45, 3-60, 3-72, 3-90, 6-9, 6-12, 6-15, 6-18, 6-21, 6-24, 6-27, 6-30, 6-36, 6-45, 6-60, 6-72, 6-90, 9-12, 9-15, 9-18, 9-21, 9-24, 9-27, 9-30, 9-36, 9-45, 9-60, 9-72, 9-90, 12-15, 12-18, 12-21, 12-24, 12-27, 12-30, 12-36, 12-45, 12-60, 12-72, 12-90, 15-18, 15-21, 15-24, 15-27, 15-30, 15-36, 15-45, 15-60, 15-72, 15-90, 18-21, 18-24, 18-27, 18-30, 18-36, 18-45, 18-60, 18-72, 18-90, 21-24, 21-27, 21-30, 21-36, 21-45, 21-60, 21-72, 21-90, 24-27, 24-30, 24-36, 24-45, 24-60, 24-72, 24-90, 27-30, 27-36, 27-45, 27-60, 27-72, 27-90, 30-36, 30-45, 30-60, 30-72, 30-90, 45-60, 45-72, 60-72, 60-90, or 72-90 nucleotide deletions compared to the endogenous sequence of the double stranded target DNA, e.g., the target gene. In some embodiments, the intended nucleotide edit comprises nucleotide deletions of 1-3000, 1-2500, 1-2000, 1-1500, 1-1000, 1-900, 1-800, 1-700, 1-600, 1-500, 1-400, 1-300, 1-200, 1-100, 1-50, 1-40, 1-30, 1-25, 1-20, 1-15, 1-10, 1-5, 500-3000, 500-2500, 500-2000, 500-1500, 500-1000, 500-900, 500-800, 500-700, 500-600, 30-300, 30-250, 30-200, 30-150, 30-100, 30-75, 30-50, 50-200, 50-150, 50-100, 50-75, 75-100, 75-150, 75-200, 75-250, or 75-300 nucleotides at each site in the double stranded target DNA compared to the endogenous sequence of the double stranded target DNA, e.g., the target gene. In some embodiments, the intended nucleotide edit comprises nucleotide deletions of 1-3, 1-6, 1-9, 1-12, 1-15, 1-18, 1-21, 1-24, 1-27, 1-30, 1-36, 1-45, 1-60, 1-72, 1-90, 3-6, 3-9, 3-12, 3-15, 3-18, 3-21, 3-24, 3-27, 3-30, 3-36, 3-45, 3-60, 3-72, 3-90, 6-9, 6-12, 6-15, 6-18, 6-21, 6-24, 6-27, 6-30, 6-36, 6-45, 6-60, 6-72, 6-90, 9-12, 9-15, 9-18, 9-21, 9-24, 9-27, 9-30, 9-36, 9-45, 9-60, 9-72, 9-90, 12-15, 12-18, 12-21, 12-24, 12-27, 12-30, 12-36, 12-45, 12-60, 12-72, 12-90, 15-18, 15-21, 15-24, 15-27, 15-30, 15-36, 15-45, 15-60, 15-72, 15-90, 18-21, 18-24, 18-27, 18-30, 18-36, 18-45, 18-60, 18-72, 18-90, 21-24, 21-27, 21-30, 21-36, 21-45, 21-60, 21-72, 21-90, 24-27, 24-30, 24-36, 24-45, 24-60, 24-72, 24-90, 27-30, 27-36, 27-45, 27-60, 27-72, 27-90, 30-36, 30-45, 30-60, 30-72, 30-90, 45-60, 45-72, 60-72, 60-90, or 72-90 nucleotides at each site in the double stranded target DNA compared to the endogenous sequence of the double stranded target DNA, e.g., the target gene.

[0325] In some embodiments, the intended nucleotide edits, e.g., nucleotide substitutions, insertions, or deletions, are in consecutive or contiguous nucleotides in the double stranded target DNA sequence compared to the endogenous sequence of the double stranded target DNA, e.g., the target gene. In some embodiments, the intended nucleotide edits, e.g., nucleotide substitutions, insertions, or deletions are in non-consecutive or non-contiguous nucleotides in the double stranded target DNA sequence compared to the endogenous sequence of the double stranded target DNA, e.g., the target gene.

[0326] In some embodiments, the intended nucleotide edit comprises an inversion as compared to the endogenous sequence of the double stranded target DNA, e.g., the target gene. In some embodiments, a segment of 2, 3, 4, 5, 6, 7, 8, 9, 10, 20, 30, 40, 50, 60, 70, 80, 90, 100, 110, 120, 130, 140, 150, 200, 250, 300 or more nucleotides of the endogenous sequence of the double stranded target DNA is inverted. In some embodiments, a segment of 1-50, 1-40, 1-30, 1-25, 1-20, 1-15, 1-10, or 1-5 nucleotides of the endogenous sequence of the double stranded target DNA is inverted. In some embodiments, a segment of 3-50, 3-40, 3-30, 3-25, 3-20, 3-15, 3-10, 3-5, 5-50, 5-40, 5-30, 5-25, 5-20, 5-15, or 5-10 nucleotides of the endogenous sequence of the double stranded target DNA is inverted.

[0327] In some embodiments, the intended nucleotide edit comprises more than one nucleotide edit in the double stranded target DNA sequence compared to the endogenous sequence of the double stranded target DNA, e.g., the target gene. In some embodiments, the intended nucleotide edit comprises a combination of one or more of nucleotide substitutions, one or more of nucleotide insertions, one or more of nucleotide deletions and one or more of nucleotide inversions compared to the endogenous sequence of the double stranded target DNA, e.g., the target gene. In some embodiments, the intended nucleotide edit comprises one or more nucleotide substitutions and one or more nucleotide insertions. In some embodiments, the intended nucleotide edit comprises one or more nucleotide substitutions and one or more nucleotide deletions. In some embodiments, the intended nucleotide edit comprises one or more nucleotide substitutions and one or more nucleotide inversions. In some embodiments, the intended nucleotide edit comprises one or more nucleotide insertions and one or more nucleotide deletions. In some embodiments, the intended nucleotide edit comprises one or more nucleotide insertions and one or more nucleotide inversions. In some embodiments, the intended nucleotide edit comprises one or more nucleotide deletions and one or more nucleotide inversions. In some embodiments, the intended nucleotide edit comprises one or more nucleotide substitutions, one or more nucleotide insertions and one or more nucleotide deletions. In some embodiments, the intended nucleotide edit comprises one or more nucleotide substitutions, one or more nucleotide insertions and one or more nucleotide inversions. In some embodiments, the intended nucleotide edit comprises one or more nucleotide substitutions, one or more nucleotide deletions and one or more nucleotide inversions. In some embodiments, the intended nucleotide edit comprises one or more nucleotide insertions, one or more nucleotide deletions and one or more nucleotide inversions. In some embodiments, the intended nucleotide edit comprises one or more nucleotide substitutions, one or more nucleotide insertions, one or more nucleotide deletions and one or more nucleotide inversions.

[0328] In some embodiments, the first newly synthesized single stranded DNA and the second newly synthesized single stranded DNA have a region of complementarity to each other. In some embodiments, the first newly synthesized single stranded DNA has a region of complementarity to an endogenous sequence of the double stranded target DNA, e.g., the target gene, adjacent to or near a nick site. In some embodiments, the first newly synthesized single stranded DNA has a region of complementarity to an endogenous sequence of the double stranded target DNA, e.g., the target gene, on the first strand adjacent to the second nick site. In some embodiments, the first newly synthesized single stranded DNA has a region of complementarity to an endogenous sequence of the double stranded target DNA, e.g., the target gene, on the first strand adjacent to and downstream of the second nick site. In some embodiments, the first newly synthesized single stranded DNA has a region of identity to an endogenous sequence of the double stranded target DNA e.g., the target gene, on the second strand adjacent to and downstream of the first nick site. In some embodiments, the first newly synthesized single stranded DNA has a region of identity to an endogenous sequence of the double stranded target on the second strand adjacent to and upstream of the second nick site.

[0329] In some embodiments, the second newly synthesized single stranded DNA has a region of complementarity to an endogenous sequence of the double stranded target DNA, e.g., the target gene, adjacent to or near a nick site. In some embodiments, the second newly synthesized single stranded DNA has a region of complementarity to an endogenous sequence of the double stranded target DNA, e.g., the target gene, on the second strand adjacent to the first nick site. In some embodiments, the second newly synthesized single stranded DNA has a region of complementarity to an endogenous sequence of the double stranded target DNA, e.g., the target gene, on the second strand adjacent to and downstream of the first nick site. In some embodiments, the second newly synthesized single stranded DNA has a region of identity to an endogenous sequence of the double stranded target DNA, e.g., the target gene, on the first strand adjacent to and upstream of the second nick site.

[0330] As used herein, reference for positioning in a chromosome or a double stranded polynucleotide, e.g., a double stranded target DNA, includes the position on either strand of the two strands, unless otherwise specified. For example, a position of a first nick site may be used refer to the first nick site on the first edit strand and/or the corresponding position on the second edit strand.

[0331] By “upstream” and “downstream” it is intended to define relative positions of at least two nucleotides, regions, or sequences in a nucleic acid molecule oriented in a 5′-to-3′ direction according to a reference strand of the nucleic acid molecule. For example, a first nucleotide is upstreat of a second nucleotide when the first nucleotide is 5′ to the second nucleotide. A first sequence is upstream of a second sequence in a DNA molecule where the first sequence is positioned 5′ to the second sequence according to a reference strand of the DNA molecule. Accordingly, the second sequence is downstream, that is, 3′, of the first sequence.

[0332] In some embodiments, each of the first newly synthesized single stranded DNA and the second newly synthesized single stranded DNA has a region of complementarity to an endogenous sequence of the double stranded target DNA, e.g., the target gene, adjacent to or near a nick site. In some embodiments, each of the first newly synthesized single stranded DNA and the second newly synthesized single stranded DNA has a region of identity to an endogenous sequence of the double stranded target DNA, e.g., the target gene, adjacent to or near a nick site. In some embodiments, the first newly synthesized single stranded DNA has a region of complementarity to an endogenous sequence of the double stranded target DNA, e.g., the target gene, on the first strand adjacent to and upstream of the second nick site, and the second newly synthesized single stranded DNA has a region of complementarity to an endogenous sequence of the double stranded target DNA, e.g., the target gene, on the second strand adjacent to and upstream of the first nick site. In some embodiments, the first newly synthesized single stranded DNA has a region of identity to an endogenous sequence of the double stranded target DNA on the second strand adjacent to and downstream of the first nick site and/or a region of identity to an endogenous sequence of the double stranded target DNA on the second strand adjacent to and downstream of the position corresponding to the second nick site, and the second newly synthesized single stranded DNA has a region of identity to an endogenous sequence of the double stranded target DNA on the first strand adjacent to and downstream of the first nick site and/or a region of identity to an endogenous sequence of the double stranded target DNA on the first strand adjacent to and downstream of the position corresponding to the first nick site.

[0333] In some embodiments, the first newly synthesized single stranded DNA encoded by the first editing template and the second newly synthesized single stranded DNA encoded by the second editing template have a region of complementarity to each other. The complementary region between the first newly synthesized single stranded DNA and the second newly synthesized single stranded DNA may be referred to as an overlap duplex (OD).

[0334] In some embodiments, the first newly synthesized single stranded DNA encoded by the first editing template and the second newly synthesized single stranded DNA encoded by the second editing template are substantially complementary to each other. In some embodiments, the OD is incorporated in the double stranded target DNA, e.g., the target gene, thereby incorporating one or more intended nucleotide edits encoded by the first editing template and the second editing template into the double stranded target DNA, e.g., the target gene. In some embodiments, the OD replaces all or a portion of the IND, thereby incorporating one or more intended nucleotide edits in the double stranded target DNA, e.g., the target gene. In some embodiments, the IND is excised or degraded, and the OD is incorporated at the place of the IND excision, followed by ligation of the nicks on both strands of the double stranded target DNA, e.g., the target gene, thereby incorporating the one or more intended nucleotide edits in the double stranded target DNA. In some embodiments, the sequence of the OD comprises partial identity compared to the sequence of the IND. In some embodiments, the sequence of the OD comprises no identity compared to the sequence of the IND. In some embodiments, the sequence of the OD comprises a sequence exogenous to the double stranded target DNA.

[0335] In some embodiments, the first editing template and the second editing template comprise a region of complementarity or substantial complementarity to each other, and do not have complementarity to either strand of the double stranded target DNA, e.g., the target gene. Accordingly, in some embodiments, the first newly synthesized single stranded DNA encoded by the first editing template and the second newly synthesized single stranded DNA encoded by the second editing template can anneal to each other to form an OD that does not have substantial sequence identity with the endogenous sequence of double stranded target DNA, e.g., the target gene. In some embodiments, the sequence of the OD comprises a sequence exogenous to the double stranded target DNA, e.g., the target gene. In some embodiments, the sequence of the OD consists of a sequence exogenous to the double stranded target DNA, e.g., the target gene. In some embodiments, the IND is excised, and the OD is incorporated at the place of the IND excision, followed by ligation of the nicks on both strands of the target DNA, thereby incorporating the sequence of the OD in the double stranded target DNA.

[0336] In some embodiments, the OD comprises 1, 2, 3, 4, 5, 6, 7, 8, 9, 10, 11, 12, 13, 14, 15, 16, 17, 18, 19, 20, 21, 22, 23, 24, 25, 30, 35, 40, 45, 50 or more contiguous complementary or substantially complementary base pairs. In some embodiments, the OD comprises about 5 to 10, 5 to 15, 5 to 20, 5 to 25, 5 to 30, 5 to 35, 5 to 40, 5 to 45, 5 to 50, 5 to 55, 5 to 60, 5 to 65, 5 to 70, 5 to 75, 5 to 80, 5 to 85, 5 to 90, 5 to 95, 5 to 100, 5 to 110, 5 to 120, 5 to 130, 5 to 140, 5 to 150, 15 to 20, 15 to 25, 15 to 30, 15 to 35, 15 to 40, 15 to 45, 15 to 50, 15 to 55, 15 to 60, 15 to 65, 15 to 70, 15 to 75, 15 to 80, 15 to 85, 15 to 90, 15 to 95, 15 to 100, 15 to 110, 15 to 120, 15 to 130, 15 to 140, 15 to 150, 25 to 30, 25 to 35, 25 to 40, 25 to 45, 25 to 50, 25 to 55, 25 to 60, 25 to 65, 25 to 70, 25 to 75, 25 to 80, 25 to 85, 25 to 90, 25 to 95, 25 to 100, 25 to 110, 25 to 120, 25 to 130, 25 to 140, 25 to 150, 35 to 40, 35 to 45, 35 to 50, 35 to 55, 35 to 60, 35 to 65, 35 to 70, 35 to 75, 35 to 80, 35 to 85, 35 to 90, 35 to 95, 35 to 100, 35 to 110, 35 to 120, 35 to 130, 35 to 140, 35 to 150, 45 to 50, 45 to 55, 45 to 60, 45 to 65, 45 to 70, 45 to 75, 45 to 80, 45 to 85, 45 to 90, 45 to 95, 45 to 100, 45 to 110, 45 to 120, 45 to 130, 45 to 140, o45 to 150, 55 to 60, 55 to 65, 55 to 70, 55 to 75, 55 to 80, 55 to 85, 55 to 90, 55 to 95, 55 to 100, 55 to 110, 55 to 120, 55 to 130, 55 to 140, 55 to 150, 65 to 70, 65 to 75, 65 to 80, 65 to 85, 65 to 90, 65 to 95, 65 to 100, 65 to 110, 65 to 120, 65 to 130, 65 to 140, 65 to 150, 75 to 80, 75 to 85, 75 to 90, 75 to 95, 75 to 100, 75 to 110, 75 to 120, 75 to 130, 75 to 140, 75 to 150, 85 to 90, 85 to 95, 85 to 100, 85 to 110, 85 to 120, 85 to 130, 85 to 140, 85 to 150, 95 to 100, 95 to 110, 95 to 120, 95 to 130, 95 to 140, 95 to 150, 105 to 110, 105 to 120, 105 to 130, 105 to 140, 105 to 150, 115 to 120, 115 to 130, 115 to 140, 115 to 150, 125 to 130, 125 to 140, 125 to 150, 135 to 140, 135 to 150, or 145 to 150 contiguous complementary or substantially complementary base pairs. In some embodiments, the OD comprise 10, 11, 12, 13, 14, 15, 16, 17, 18, 19, 20, 21, 22, 23, 24 or 25 contiguous complementary or substantially complementary base pairs. In some embodiments, the OD comprise 30, 35, 40, 50, 60, 70, 80, 90, or 100 contiguous complementary or substantially complementary base pairs. In some embodiments, the OD comprise no greater than 20, 25, 30, 35, 40, 50, 60, 70, 80, 90, or 100 contiguous complementary or substantially complementary base pairs. In some embodiments, the OD comprises a sufficient number of contiguous complementary base pairs to form a sufficiently stable duplex for replacement of the IND. In some embodiments, the OD comprises at least 10 contiguous complementary or substantially complementary base pairs. In some embodiments, the OD comprises at least 15 contiguous complementary or substantially complementary base pairs. In some embodiments, the OD comprises about 20 contiguous complementary or substantially complementary base pairs.

[0337] In some embodiments, the OD contains about 20 to 40 contiguous complementary or substantially complementary base pairs. In some embodiments, the OD contains about 20, about 30, about 40, about 50, about 60, about 70, or about 80 contiguous complementary or substantially complementary base pairs. In some embodiments, the OD contains about 10 to 19 contiguous complementary or substantially complementary base pairs. In some embodiments, the OD contains about 20 to 30 contiguous complementary or substantially complementary base pairs. In some embodiments, the OD contains about 30 to 40 contiguous complementary or substantially complementary base pairs. In some embodiments, the OD contains at least 40 contiguous complementary or substantially complementary base pairs. In some embodiments, the OD consists of about 20 to 40 contiguous complementary or substantially complementary base pairs. In some embodiments, the OD consists of about 20, about 30, about 40, about 50, about 60, about 70, or about 80 contiguous complementary or substantially complementary base pairs. In some embodiments, the OD consists of about 10 to 19 contiguous complementary or substantially complementary base pairs. In some embodiments, the OD consists of about 20 to 30 contiguous complementary or substantially complementary base pairs. In some embodiments, the OD consists of about 30 to 40 contiguous complementary or substantially complementary base pairs. In some embodiments, the OD consists of 23, 38, 53, 68, or 83 contiguous complementary or substantially complementary base pairs. In some embodiments, the OD consists of 38 contiguous complementary or substantially complementary base pairs.

[0338] The sequence of the OD can comprises any exogenous sequence or any endogenous sequence of the DMPK gene. The GC content of the OD may vary. In some embodiments, the GC content of the OD is less than about 45%. In some embodiments, the GC content of the OD is about 45%-60%. In some embodiments, the GC content of the OD is about 60%-75%. In some embodiments, the GC content of the OD is at least about 75%. In some embodiments, the GC content of the OD is about 40%-80%. In some embodiments, the GC content of the OD is about 50%-60%. In some embodiments, the GC content of the OD is about 60%-80%. In some embodiments, the GC content of the OD is about 60%-70%. In some embodiments, the GC content of the OD is about 70%-80%. In some embodiments, the GC content of the OD is about 10%-20%, about 20%-30%, about 30%-40%, about 40%-50%, about 50%-60%, about 60%-70%, about 70%-80%, about 80%-90% or about 90%-100%. In some embodiments, the GC content of the OD is about 42%. In some embodiments, the GC content of the OD is about 53%. In some embodiments, the GC content of the OD is about 63%. In some embodiments, the GC content of the OD is about 71%. In some embodiments, the GC content of the OD is about 79%. In some embodiments, the GC content of the OD is about 63%.

[0339] In some embodiments, the OD replaces the IND of a target DNA, wherein the double stranded target DNA is an entire target gene or is part of a target gene. In some embodiments, the OD replaces part of an exon or an entire exon, part of an intron or an entire intron, one or more exons and intervening introns, all of the coding regions of a target gene, regulatory sequences of a target gene, or the entire target gene comprising its exons, introns and regulatory sequences. In some embodiments, the OD comprises a region of identity to an endogenous sequence of the double stranded target DNA. In some embodiments, the OD does not have sequence identity to an endogenous sequence of the double stranded target DNA. In some embodiments, the OD is exogenous to the double stranded target DNA, e.g., the target gene.

[0340] In some embodiments, the OD has a biological function or encodes a polypeptide having a biological function, or a portion thereof. In some embodiments, the OD comprises an expression cassette. In some embodiments, the OD comprises a nucleotide sequence that encodes an expression tag, for example, an affinity tag, a His tag, a V5 tag, or a FLAG tag. In some embodiments, the OD comprises a nucleotide sequence that encodes a His tag. In some embodiments, the OD comprises a nucleotide sequence that encodes a FLAG tag. In some embodiments, the OD comprises a nucleotide sequence that encodes an attB or an attP sequence. In some embodiments, the OD comprises a nucleotide sequence that encodes a reporter protein, for example, a green fluorescence protein, a blue fluorescence protein, a cyan fluorescence protein, a yellow fluorescence protein, an auto fluorescent protein, or a luciferase. In some embodiments, the OD comprises a recognition site of an enzyme, for example, a recombinase recognition sequence. In some embodiments, the OD comprises nucleotide sequence that encodes a selectable marker, for example, an antibiotic resistance marker. In some embodiments, the OD comprises a regulatory sequence, for example, a promoter, an enhancer, or an insulator. In some embodiments, the OD comprises a trackable sequence, for example, a barcode. In some embodiments, replacement of the IND by the OD restores or partially restores the function of the target gene. In some embodiments, the target gene is a disease-associated gene. In some embodiments, the target gene is a monogenic disease-associated gene. In some embodiments, the target gene is a polygenic disease-associated gene. In some embodiments, the target gene is a disease-associated gene containing one or more disease-causing mutations, wherein replacement of the IND by the OD corrects the mutations, thereby restoring or partially restoring the function of the target gene. In some embodiments, the disease-associated gene containing one or more disease-causing mutations is in a human subject in need of treatment. In some embodiments, the target gene is a mutated gene causing a disease or disorder in a human subject, wherein replacement of the IND by the OD corrects the mutated gene, thereby restoring or partially restoring the function of the target gene. In some embodiments, the target gene is a disease-associated gene containing one or more disease-causing mutations, wherein replacement of the IND by the OD modifies the target gene to restore or partially restore the function of the target gene. In some embodiments, the disease-associated gene containing one or more disease-causing mutations is in a human subject in need of treatment. In some embodiments, the target gene is a mutated gene causing a disease or disorder in a human subject, wherein replacement of the IND by the OD modifies the mutated gene to restore or partially restore the function of the target gene.

[0341] In some embodiments, the first editing template and/or the second editing template comprises a nucleotide sequence that encodes a polypeptide sequence that is the same as, or a portion of, the polypeptide sequence encoded by the IND, but does not have substantial nucleotide sequence complementarity or identity to the sequence of the IND. In some embodiments, the second newly synthesized single stranded DNA encoded by the second editing template comprises a nucleotide sequence that encodes a polypeptide sequence that is the same as, or a portion of, the polypeptide sequence encoded by the IND, but does not have substantial nucleotide sequence complementarity or identity to the sequence of the IND. Accordingly, in some embodiments, the OD comprises a sequence that encodes a polypeptide sequence that is the same as the polypeptide sequence or a portion of the same polypeptide sequence encoded by the IND, wherein the OD does not have substantial nucleotide sequence identity to the sequence of the IND.

[0342] In some embodiments, the first newly synthesized single stranded DNA encoded by the first editing template and the second newly synthesized single stranded DNA encoded by the second editing template comprises a region of complementarity with each other, and can anneal with each other to form an OD. In some embodiments, the first newly synthesized single stranded DNA encoded by the first editing template further comprises a region that does not have complementarity with the second newly synthesized single stranded DNA encoded by the second editing template (see exemplary schematic in FIG. 4B). In some embodiments, the second newly synthesized single stranded DNA encoded by the second editing template further comprises a region that does not have complementarity with the first newly synthesized single stranded DNA encoded by the first editing template. Accordingly, in some embodiments, the first newly synthesized single stranded DNA encoded by the first editing template and the second newly synthesized single stranded DNA encoded by the second editing template can anneal to each other through the partially complementary sequences to form an OD that is linked to a 5′ overhang and/or a 3′ overhang. In some embodiments, the IND is removed, the OD, along with the 5′ overhang and/or the 3′ overhang, is incorporated at the place of the IND excision in the double stranded target DNA, e.g., the target gene. Through DNA repair, the gaps corresponding to the positions of the 5′ overhang and/or the 3′ overhangs are filled and ligated, thereby incorporating the one or more intended nucleotide edits in the double stranded target DNA, e.g., the target gene.

[0343] Accordingly, in some embodiments, the IND is replaced by the sequence of (A+C), (B+C), or (A+B+C), wherein A is the region, and its complementary strand, of the first newly synthesized single stranded DNA that is not complementary to the second newly synthesized single stranded DNA, wherein B is the region, and its complementary strand, of the second newly synthesized single stranded DNA that is not complementary to the first newly synthesized single stranded DNA, and wherein C is the OD. The double stranded sequence of (A+C), (B+C), or (A+B+C) that replaces the IND may be referred to as the “replacement duplex (RD)”.

[0344] Accordingly, in some embodiments, the RD comprises the OD. In some embodiments, as exemplified in FIG. 4A, the first editing template and the second editing template are substantially complementary to each other. Accordingly, in some embodiments, the OD comprises the entirety or substantially the entirety of the first newly synthesized single stranded DNA encoded by the first editing template and the second newly synthesized single stranded DNA encoded by the second editing template. In some embodiments, the RD consists of the OD. In some embodiments, as exemplified in FIG. 4B, the RD comprises the OD, the non-complementary region of the first newly synthesized DNA compared to the second newly synthesized DNA and complement thereof, and/or the non-complementary region of the second newly synthesized DNA compared to the first newly synthesized DNA and complement thereof.

[0345] In some embodiments, the RD comprises 1, 2, 3, 4, 5, 6, 7, 8, 9, 10, 11, 12, 13, 14, 15, 16, 17, 18, 19, 20, 21, 22, 23, 24, 25, 30, 35, 40, 45, 50, 60, 70, 80, 90, 100, 110, 120, 130, 140, 150, 160, 170, 180, 190, 200 or more base pairs. In some embodiments, the RD comprises about 5 to 10, 5 to 15, 5 to 20, 5 to 25, 5 to 30, 5 to 35, 5 to 40, 5 to 45, 5 to 50, 5 to 55, 5 to 60, 5 to 65, 5 to 70, 5 to 75, 5 to 80, 5 to 85, 5 to 90, 5 to 95, 5 to 100, 5 to 110, 5 to 120, 5 to 130, 5 to 140, 5 to 150, 5 to 175, 5 to 200, 5 to 225, 5 to 250, 5 to 275, 5 to 300, 5 to 325, 5 to 350, 5 to 375, 5 to 400, 5 to 425, 5 to 450, 5 to 475, 5 to 500, 10 to 15, 10 to 20, 10 to 25, 10 to 30, 10 to 35, 10 to 40, 10 to 45, 10 to 50, 10 to 55, 10 to 60, 10 to 65, 10 to 70, 10 to 75, 10 to 80, 10 to 85, 10 to 90, 10 to 95, 10 to 100, 10 to 110, 10 to 120, 10 to 130, 10 to 140, 10 to 150, 10 to 175, 10 to 200, 10 to 225, 10 to 250, 10 to 275, 10 to 300, 10 to 325, 10 to 350, 10 to 375, 10 to 400, 10 to 425, 10 to 450, 10 to 475, 10 to 500, 15 to 20, 15 to 25, 15 to 30, 15 to 35, 15 to 40, 15 to 45, 15 to 50, 15 to 55, 15 to 60, 15 to 65, 15 to 70, 15 to 75, 15 to 80, 15 to 85, 15 to 90, 15 to 95, 15 to 100, 15 to 110, 15 to 120, 15 to 130, 15 to 140, 15 to 150, 15 to 175, 15 to 200, 15 to 225, 15 to 250, 15 to 275, 15 to 300, 15 to 325, 15 to 350, 15 to 375, 15 to 400, 15 to 425, 15 to 450, 15 to 475, 15 to 500, 20 to 25, 20 to 30, 20 to 35, 20 to 40, 20 to 45, 20 to 50, 20 to 55, 20 to 60, 20 to 65, 20 to 70, 20 to 75, 20 to 80, 20 to 85, 20 to 90, 20 to 95, 20 to 100, 20 to 110, 20 to 120, 20 to 130, 20 to 140, 20 to 150, 20 to 175, 20 to 200, 20 to 225, 20 to 250, 20 to 275, 20 to 300, 20 to 325, 20 to 350, 20 to 375, 20 to 400, 20 to 425, 20 to 450, 20 to 475, 20 to 500, 30 to 35, 30 to 40, 30 to 45, 30 to 50, 30 to 55, 30 to 60, 30 to 65, 30 to 70, 30 to 75, 30 to 80, 30 to 85, 30 to 90, 30 to 95, 30 to 100, 30 to 110, 30 to 120, 30 to 130, 30 to 140, 30 to 150, 30 to 175, 30 to 200, 30 to 225, 30 to 250, 30 to 275, 30 to 300, 30 to 325, 30 to 350, 30 to 375, 30 to 400, 30 to 425, 30 to 450, 30 to 475, 30 to 500, 40 to 45, 40 to 50, 40 to 55, 40 to 60, 40 to 65, 40 to 70, 40 to 75, 40 to 80, 40 to 85, 40 to 90, 40 to 95, 40 to 100, 40 to 110, 40 to 120, 40 to 130, 40 to 140, 40 to 150, 40 to 175, 40 to 200, 40 to 225, 40 to 250, 40 to 275, 40 to 300, 40 to 325, 40 to 350, 40 to 375, 40 to 400, 40 to 425, 40 to 450, 40 to 475, 40 to 500, 50 to 55, 50 to 60, 50 to 65, 50 to 70, 50 to 75, 50 to 80, 50 to 85, 50 to 90, 50 to 95, 50 to 100, 50 to 110, 50 to 120, 50 to 130, 50 to 140, 50 to 150, 50 to 175, 50 to 200, 50 to 225, 50 to 250, 50 to 275, 50 to 300, 50 to 325, 50 to 350, 50 to 375, 50 to 400, 50 to 425, 50 to 450, 50 to 475, 50 to 500, 75 to 80, 75 to 85, 75 to 90, 75 to 95, 75 to 100, 75 to 110, 75 to 120, 75 to 130, 75 to 140, 75 to 150, 75 to 175, 75 to 200, 75 to 225, 75 to 250, 75 to 275, 75 to 300, 75 to 325, 75 to 350, 75 to 375, 75 to 400, 75 to 425, 75 to 450, 75 to 475, 75 to 500, 100 to 110, 100 to 120, 100 to 130, 100 to 140, 100 to 150, 100 to 175, 100 to 200, 100 to 225, 100 to 250, 100 to 275, 100 to 300, 100 to 325, 100 to 350, 100 to 375, 100 to 400, 100 to 425, 100 to 450, 100 to 475, 100 to 500, 125 to 150, 125 to 175, 125 to 200, 125 to 225, 125 to 250, 125 to 275, 125 to 300, 125 to 325, 125 to 350, 125 to 375, 125 to 400, 125 to 425, 125 to 450, 125 to 475, 125 to 500, 150 to 175, 150 to 200, 150 to 225, 150 to 250, 150 to 275, 150 to 300, 150 to 325, 150 to 350, 150 to 375, 150 to 400, 150 to 425, 150 to 450, 150 to 475, 150 to 500, 175 to 200, 175 to 225, 175 to 250, 175 to 275, 175 to 300, 175 to 325, 175 to 350, 175 to 375, 175 to 400, 175 to 425, 175 to 450, 175 to 475, 175 to 500, 200 to 250, 200 to 275, 200 to 300, 200 to 325, 200 to 350, 200 to 375, 200 to 400, 200 to 425, 200 to 450, 200 to 475, 200 to 500, 225 to 250, 225 to 275, 225 to 300, 225 to 325, 225 to 350, 225 to 375, 225 to 400, 225 to 425, 225 to 450, 225 to 475, 225 to 500, 250 to 275, 250 to 300, 275 to 300, 275 to 325, 275 to 350, 275 to 375, 275 to 400, 275 to 425, 275 to 450, 275 to 475, 275 to 500, 300 to 325, 300 to 350, 300 to 375, 300 to 400, 300 to 425, 300 to 450, 300 to 475, 300 to 500, 325 to 350, 325 to 375, 325 to 400, 325 to 425, 325 to 450, 325 to 475, 325 to 500, 350 to 375, 350 to 400, 350 to 425, 350 to 450, 350 to 475, 350 to 500, 375 to 400, 375 to 425, 375 to 450, 375 to 475, 375 to 500, 400 to 425, 400 to 450, 400 to 475, 400 to 500, 425 to 450, 425 to 475, 425 to 500, 450 to 475, 450 to 500, or 475 to 500 base pairs. In some embodiments, the RD comprise 13, 14, 15, 16, 17, 18, 19, 20, 21, 22, 23, 24, 25, 26, 27, 28, 29, 30, 31, 32, 33, 34, 35, 36, 37, 38, 39, 40, 41, 42, 43, 44, 45, 46, 47, 48, 49, or 50 base pairs. In some embodiments, the RD comprise at least 30, 35, 40, 50, 60, 70, 80, 90, 100, 110, 120, 130, 140, 150, 160, 170, 180, 190, 200, 210, 220, 230, 240, 250, 260, 270, 280, 290, 300, 310, 320, 330, 340, 350, 360, 370, 380, 390, 400, 410, 420, 430, 440, 450, 460, 470, 480, 490, or 500 base pairs. In some embodiments, the RD comprise no greater than 20, 25, 30, 35, 40, 50, 60, 70, 80, 90, 100, 110, 120, 130, 140, 150, 160, 170, 180, 190, 200, 210, 220, 230, 240, 250, 260, 270, 280, 290, 300, 310, 320, 330, 340, 350, 360, 370, 380, 390, 400, 410, 420, 430, 440, 450, 460, 470, 480, 490, or 500 base pairs.

[0346] In some embodiments, the RD replaces the IND of a target DNA, wherein the IND is an entire target gene or is part of a target gene. In some embodiments, the RD replaces part of an exon or an entire exon, part of an intron or an entire intron, one or more exons and intervening introns, all of the coding regions of a target gene, regulatory sequences of a target gene, or the entire target gene comprising its exons, introns and regulatory sequences, thereby incorporating the one or more intended nucleotide edits compared to the endogenous sequence of the double stranded target DNA, e.g., the DMPK gene. In some embodiments, the RD comprises a region of identity to an endogenous sequence of the double stranded target DNA. In some embodiments, the RD does not have sequence identity to an endogenous sequence of the double stranded target DNA. In some embodiments, the RD is exogenous to the double stranded target DNA, e.g., the target gene. Accordingly, in some embodiments, the intended nucleotide edit(s) comprises replacement of an endogenous sequence of the double stranded target DNA, e.g., the DMPK gene, in its entirety, by the sequence of the RD.

[0347] In some embodiments, the RD has a biological function or encodes a polypeptide having a biological function. In some embodiments, the RD comprises an expression cassette. In some embodiments, the RD comprises a nucleotide sequence that encodes an expression tag, for example, an affinity tag, a His tag, a V5 tag, or a FLAG tag. In some embodiments, the RD comprises a nucleotide sequence that encodes a His tag. In some embodiments, the RD comprises a nucleotide sequence that encodes a FLAG tag. In some embodiments, the RD comprises a nucleotide sequence that encodes an attB or an attP sequence. In some embodiments, the RD comprises a nucleotide sequence that encodes a reporter protein, for example, a green fluorescence protein, a blue fluorescence protein, a cyan fluorescence protein, a yellow fluorescence protein, an auto fluorescent protein, or a luciferase. In some embodiments, the RD comprises a recognition site of an enzyme, for example, a recombinase recognition sequence. In some embodiments, the RD comprises a nucleotide sequence that encodes a selectable marker, for example, an antibiotic resistance marker. In some embodiments, the RD comprises a regulatory sequence, for example, a promoter, an enhancer, or an insulator. In some embodiments, the RD comprises a trackable sequence, for example, a barcode. In some embodiments, replacement of the IND by the RD restores or partially restores the function of the target gene. In some embodiments, the target gene is a disease-associated gene. In some embodiments, the target gene is a monogenic disease-associated gene. In some embodiments, the target gene is a polygenic disease-associated gene. In some embodiments, the target gene is a disease-associated gene containing one or more disease-causing mutations, wherein replacement of the IND by the RD corrects the mutations, thereby restoring or partially restoring the function of the target gene. In some embodiments, the disease-associated gene containing one or more disease-causing mutations is in a human subject in need of treatment. In some embodiments, the target gene is a mutated gene causing a disease or disorder in a human subject, wherein replacement of the IND by the RD corrects the mutated gene, thereby restoring or partially restoring the function of the target gene. In some embodiments, the target gene is a disease-associated gene containing one or more disease-causing mutations, wherein replacement of the IND by the RD modifies the target gene to restore or partially restore the function of the target gene. In some embodiments, the disease-associated gene containing one or more disease-causing mutations is in a human subject in need of treatment. In some embodiments, the target gene is a mutated gene causing a disease or disorder in a human subject, wherein replacement of the IND by the RD modifies the mutated gene to restore or partially restore the function of the target gene.

[0348] In some embodiments, the first editing template and the second editing template are partially complementary to each other. As used herein, the first editing template is partially complementary to the second editing template when the first and the second editing templates have complementary or substantially complementary region(s) over part of the length of both editing templates. The partially complementary region(s) in the first editing template and the second editing template can be in any position within the first editing template and the second editing template. Accordingly, in some embodiments, the first newly synthesized single stranded DNA encoded by the first editing template and the second newly synthesized single stranded DNA encoded by the second editing template are partially complementary to each other, at any position within the first newly synthesized single stranded DNA encoded by the first editing template and the second newly synthesized single stranded DNA encoded by the second editing template. In some embodiments, the first newly synthesized single stranded DNA comprises a region of complementarity to the second newly synthesized single stranded DNA, at or near the 3′ end of the first newly synthesized single stranded DNA. In some embodiments, the first newly synthesized single stranded DNA comprises a region of complementarity to the second newly synthesized single stranded DNA, at or near the 5′ end of the first newly synthesized single stranded DNA. In some embodiments, the first newly synthesized single stranded DNA comprises a region of complementarity to the second newly synthesized single stranded DNA, in the middle of the first newly synthesized single stranded DNA.

[0349] In some embodiments, the second newly synthesized single stranded DNA comprises a region of complementarity to the first newly synthesized single stranded DNA, at or near the 3′ end of the second newly synthesized single stranded DNA. In some embodiments, the second newly synthesized single stranded DNA comprises a region of complementarity to the first newly synthesized single stranded DNA, at or near the 5′ end of the second newly synthesized single stranded DNA. In some embodiments, the second newly synthesized single stranded DNA comprises a region of complementarity to the first newly synthesized single stranded DNA, in the middle of the second newly synthesized single stranded DNA.

[0350] In some embodiments, the first newly synthesized single stranded DNA and the second newly synthesized single stranded DNA each comprises a region of complementarity to each other at the 3′ end of each of the first newly synthesized single stranded DNA and the second newly synthesized single stranded DNA.

[0351] In some embodiments, the first editing template and the second editing template are of the same length. In some embodiments, the first editing template and the second editing template are of different lengths.

[0352] In some embodiments, the first editing template comprises a region that has complementarity or substantial complementarity to the second editing template (the OD encoding region), and further comprises a region that does not have complementarity to the second editing template. In some embodiments, the first editing template comprises a region that has complementarity or substantial complementarity to the second editing template (the OD encoding region), wherein the region is flanked by one or more regions that do not have complementarity to the second editing template. In some embodiments, the entirety of the first editing template has complementarity or substantial complementarity to a region of the second editing template, wherein the second editing template comprises a region that does not have complementarity to the first editing template.

[0353] In some embodiments, the first editing template comprises a region that does not have complementarity to the second editing template, wherein the region is about 5 to 10, 5 to 15, 5 to 20, 5 to 25, 5 to 30, 5 to 35, 5 to 40, 5 to 45, 5 to 50, 5 to 55, 5 to 60, 5 to 65, 5 to 70, 5 to 75, 5 to 80, 5 to 85, 5 to 90, 5 to 95, 5 to 100, 5 to 110, 5 to 120, 5 to 130, 5 to 140, 5 to 150, 5 to 175, 5 to 200, 5 to 225, 5 to 250, 5 to 275, 5 to 300, 5 to 325, 5 to 350, 5 to 375, 5 to 400, 5 to 425, 5 to 450, 5 to 475, 5 to 500, 10 to 15, 10 to 20, 10 to 25, 10 to 30, 10 to 35, 10 to 40, 10 to 45, 10 to 50, 10 to 55, 10 to 60, 10 to 65, 10 to 70, 10 to 75, 10 to 80, 10 to 85, 10 to 90, 10 to 95, 10 to 100, 10 to 110, 10 to 120, 10 to 130, 10 to 140, 10 to 150, 10 to 175, 10 to 200, 10 to 225, 10 to 250, 10 to 275, 10 to 300, 10 to 325, 10 to 350, 10 to 375, 10 to 400, 10 to 425, 10 to 450, 10 to 475, 10 to 500, 15 to 20, 15 to 25, 15 to 30, 15 to 35, 15 to 40, 15 to 45, 15 to 50, 15 to 55, 15 to 60, 15 to 65, 15 to 70, 15 to 75, 15 to 80, 15 to 85, 15 to 90, 15 to 95, 15 to 100, 15 to 110, 15 to 120, 15 to 130, 15 to 140, 15 to 150, 15 to 175, 15 to 200, 15 to 225, 15 to 250, 15 to 275, 15 to 300, 15 to 325, 15 to 350, 15 to 375, 15 to 400, 15 to 425, 15 to 450, 15 to 475, 15 to 500, 20 to 25, 20 to 30, 20 to 35, 20 to 40, 20 to 45, 20 to 50, 20 to 55, 20 to 60, 20 to 65, 20 to 70, 20 to 75, 20 to 80, 20 to 85, 20 to 90, 20 to 95, 20 to 100, 20 to 110, 20 to 120, 20 to 130, 20 to 140, 20 to 150, 20 to 175, 20 to 200, 20 to 225, 20 to 250, 20 to 275, 20 to 300, 20 to 325, 20 to 350, 20 to 375, 20 to 400, 20 to 425, 20 to 450, 20 to 475, 20 to 500, 30 to 35, 30 to 40, 30 to 45, 30 to 50, 30 to 55, 30 to 60, 30 to 65, 30 to 70, 30 to 75, 30 to 80, 30 to 85, 30 to 90, 30 to 95, 30 to 100, 30 to 110, 30 to 120, 30 to 130, 30 to 140, 30 to 150, 30 to 175, 30 to 200, 30 to 225, 30 to 250, 30 to 275, 30 to 300, 30 to 325, 30 to 350, 30 to 375, 30 to 400, 30 to 425, 30 to 450, 30 to 475, 30 to 500, 40 to 45, 40 to 50, 40 to 55, 40 to 60, 40 to 65, 40 to 70, 40 to 75, 40 to 80, 40 to 85, 40 to 90, 40 to 95, 40 to 100, 40 to 110, 40 to 120, 40 to 130, 40 to 140, 40 to 150, 40 to 175, 40 to 200, 40 to 225, 40 to 250, 40 to 275, 40 to 300, 40 to 325, 40 to 350, 40 to 375, 40 to 400, 40 to 425, 40 to 450, 40 to 475, 40 to 500, 50 to 55, 50 to 60, 50 to 65, 50 to 70, 50 to 75, 50 to 80, 50 to 85, 50 to 90, 50 to 95, 50 to 100, 50 to 110, 50 to 120, 50 to 130, 50 to 140, 50 to 150, 50 to 175, 50 to 200, 50 to 225, 50 to 250, 50 to 275, 50 to 300, 50 to 325, 50 to 350, 50 to 375, 50 to 400, 50 to 425, 50 to 450, 50 to 475, 50 to 500, 75 to 80, 75 to 85, 75 to 90, 75 to 95, 75 to 100, 75 to 110, 75 to 120, 75 to 130, 75 to 140, 75 to 150, 75 to 175, 75 to 200, 75 to 225, 75 to 250, 75 to 275, 75 to 300, 75 to 325, 75 to 350, 75 to 375, 75 to 400, 75 to 425, 75 to 450, 75 to 475, 75 to 500, 100 to 110, 100 to 120, 100 to 130, 100 to 140, 100 to 150, 100 to 175, 100 to 200, 100 to 225, 100 to 250, 100 to 275, 100 to 300, 100 to 325, 100 to 350, 100 to 375, 100 to 400, 100 to 425, 100 to 450, 100 to 475, 100 to 500, 125 to 150, 125 to 175, 125 to 200, 125 to 225, 125 to 250, 125 to 275, 125 to 300, 125 to 325, 125 to 350, 125 to 375, 125 to 400, 125 to 425, 125 to 450, 125 to 475, 125 to 500, 150 to 175, 150 to 200, 150 to 225, 150 to 250, 150 to 275, 150 to 300, 150 to 325, 150 to 350, 150 to 375, 150 to 400, 150 to 425, 150 to 450, 150 to 475, 150 to 500, 175 to 200, 175 to 225, 175 to 250, 175 to 275, 175 to 300, 175 to 325, 175 to 350, 175 to 375, 175 to 400, 175 to 425, 175 to 450, 175 to 475, 175 to 500, 200 to 250, 200 to 275, 200 to 300, 200 to 325, 200 to 350, 200 to 375, 200 to 400, 200 to 425, 200 to 450, 200 to 475, 200 to 500, 225 to 250, 225 to 275, 225 to 300, 225 to 325, 225 to 350, 225 to 375, 225 to 400, 225 to 425, 225 to 450, 225 to 475, 225 to 500, 250 to 275, 250 to 300, 275 to 300, 275 to 325, 275 to 350, 275 to 375, 275 to 400, 275 to 425, 275 to 450, 275 to 475, 275 to 500, 300 to 325, 300 to 350, 300 to 375, 300 to 400, 300 to 425, 300 to 450, 300 to 475, 300 to 500, 325 to 350, 325 to 375, 325 to 400, 325 to 425, 325 to 450, 325 to 475, 325 to 500, 350 to 375, 350 to 400, 350 to 425, 350 to 450, 350 to 475, 350 to 500, 375 to 400, 375 to 425, 375 to 450, 375 to 475, 375 to 500, 400 to 425, 400 to 450, 400 to 475, 400 to 500, 425 to 450, 425 to 475, 425 to 500, 450 to 475, 450 to 500, or 475 to 500 nucleotides in length. In some embodiments, the first editing template comprises a region that does not have complementarity to the second editing template, wherein the region is about 1, 2, 3, 4, 5, 6, 7, 8, 9, 10, 11, 12, 13, 14, 15, 16, 17, 18, 19, 20, 21, 22, 23, 24, 25, 30, 35, 40, 45, 50, 60, 70, 80, 90, 100, 110, 120, 130, 140, 150, 160, 170, 180, 190, 200, 210, 220, 230, 240, 250, 260, 270, 280, 290, 300, 310, 320, 330, 340, 350, 360, 370, 380, 390, 400, 410, 420, 430, 440, 450, 460, 470, 480, 490, or 500 or more nucleotides in length.

[0354] In some embodiments, the second editing template comprises a region that has complementarity or substantial complementarity to the first editing template, and further comprises a region that does not have complementarity to the first editing template. In some embodiments, the second editing template comprises a region that has complementarity or substantial complementarity to the first editing template, and is flanked by one or more regions that do not have complementarity to the first editing template. The region(s) in the first editing template and the second editing template may have same or different lengths. In some embodiments, the entirety of the second editing template has complementarity or substantial complementarity to a region of the first editing template, wherein the first editing template comprises a region that does not have complementarity to the second editing template.

[0355] In some embodiments, the second editing template comprises a region that does not have complementarity to the first editing template, wherein the region is about 5 to 10, 5 to 15, 5 to 20, 5 to 25, 5 to 30, 5 to 35, 5 to 40, 5 to 45, 5 to 50, 5 to 55, 5 to 60, 5 to 65, 5 to 70, 5 to 75, 5 to 80, 5 to 85, 5 to 90, 5 to 95, 5 to 100, 5 to 110, 5 to 120, 5 to 130, 5 to 140, 5 to 150, 5 to 175, 5 to 200, 5 to 225, 5 to 250, 5 to 275, 5 to 300, 5 to 325, 5 to 350, 5 to 375, 5 to 400, 5 to 425, 5 to 450, 5 to 475, 5 to 500, 10 to 15, 10 to 20, 10 to 25, 10 to 30, 10 to 35, 10 to 40, 10 to 45, 10 to 50, 10 to 55, 10 to 60, 10 to 65, 10 to 70, 10 to 75, 10 to 80, 10 to 85, 10 to 90, 10 to 95, 10 to 100, 10 to 110, 10 to 120, 10 to 130, 10 to 140, 10 to 150, 10 to 175, 10 to 200, 10 to 225, 10 to 250, 10 to 275, 10 to 300, 10 to 325, 10 to 350, 10 to 375, 10 to 400, 10 to 425, 10 to 450, 10 to 475, 10 to 500, 15 to 20, 15 to 25, 15 to 30, 15 to 35, 15 to 40, 15 to 45, 15 to 50, 15 to 55, 15 to 60, 15 to 65, 15 to 70, 15 to 75, 15 to 80, 15 to 85, 15 to 90, 15 to 95, 15 to 100, 15 to 110, 15 to 120, 15 to 130, 15 to 140, 15 to 150, 15 to 175, 15 to 200, 15 to 225, 15 to 250, 15 to 275, 15 to 300, 15 to 325, 15 to 350, 15 to 375, 15 to 400, 15 to 425, 15 to 450, 15 to 475, 15 to 500, 20 to 25, 20 to 30, 20 to 35, 20 to 40, 20 to 45, 20 to 50, 20 to 55, 20 to 60, 20 to 65, 20 to 70, 20 to 75, 20 to 80, 20 to 85, 20 to 90, 20 to 95, 20 to 100, 20 to 110, 20 to 120, 20 to 130, 20 to 140, 20 to 150, 20 to 175, 20 to 200, 20 to 225, 20 to 250, 20 to 275, 20 to 300, 20 to 325, 20 to 350, 20 to 375, 20 to 400, 20 to 425, 20 to 450, 20 to 475, 20 to 500, 30 to 35, 30 to 40, 30 to 45, 30 to 50, 30 to 55, 30 to 60, 30 to 65, 30 to 70, 30 to 75, 30 to 80, 30 to 85, 30 to 90, 30 to 95, 30 to 100, 30 to 110, 30 to 120, 30 to 130, 30 to 140, 30 to 150, 30 to 175, 30 to 200, 30 to 225, 30 to 250, 30 to 275, 30 to 300, 30 to 325, 30 to 350, 30 to 375, 30 to 400, 30 to 425, 30 to 450, 30 to 475, 30 to 500, 40 to 45, 40 to 50, 40 to 55, 40 to 60, 40 to 65, 40 to 70, 40 to 75, 40 to 80, 40 to 85, 40 to 90, 40 to 95, 40 to 100, 40 to 110, 40 to 120, 40 to 130, 40 to 140, 40 to 150, 40 to 175, 40 to 200, 40 to 225, 40 to 250, 40 to 275, 40 to 300, 40 to 325, 40 to 350, 40 to 375, 40 to 400, 40 to 425, 40 to 450, 40 to 475, 40 to 500, 50 to 55, 50 to 60, 50 to 65, 50 to 70, 50 to 75, 50 to 80, 50 to 85, 50 to 90, 50 to 95, 50 to 100, 50 to 110, 50 to 120, 50 to 130, 50 to 140, 50 to 150, 50 to 175, 50 to 200, 50 to 225, 50 to 250, 50 to 275, 50 to 300, 50 to 325, 50 to 350, 50 to 375, 50 to 400, 50 to 425, 50 to 450, 50 to 475, 50 to 500, 75 to 80, 75 to 85, 75 to 90, 75 to 95, 75 to 100, 75 to 110, 75 to 120, 75 to 130, 75 to 140, 75 to 150, 75 to 175, 75 to 200, 75 to 225, 75 to 250, 75 to 275, 75 to 300, 75 to 325, 75 to 350, 75 to 375, 75 to 400, 75 to 425, 75 to 450, 75 to 475, 75 to 500, 100 to 110, 100 to 120, 100 to 130, 100 to 140, 100 to 150, 100 to 175, 100 to 200, 100 to 225, 100 to 250, 100 to 275, 100 to 300, 100 to 325, 100 to 350, 100 to 375, 100 to 400, 100 to 425, 100 to 450, 100 to 475, 100 to 500, 125 to 150, 125 to 175, 125 to 200, 125 to 225, 125 to 250, 125 to 275, 125 to 300, 125 to 325, 125 to 350, 125 to 375, 125 to 400, 125 to 425, 125 to 450, 125 to 475, 125 to 500, 150 to 175, 150 to 200, 150 to 225, 150 to 250, 150 to 275, 150 to 300, 150 to 325, 150 to 350, 150 to 375, 150 to 400, 150 to 425, 150 to 450, 150 to 475, 150 to 500, 175 to 200, 175 to 225, 175 to 250, 175 to 275, 175 to 300, 175 to 325, 175 to 350, 175 to 375, 175 to 400, 175 to 425, 175 to 450, 175 to 475, 175 to 500, 200 to 250, 200 to 275, 200 to 300, 200 to 325, 200 to 350, 200 to 375, 200 to 400, 200 to 425, 200 to 450, 200 to 475, 200 to 500, 225 to 250, 225 to 275, 225 to 300, 225 to 325, 225 to 350, 225 to 375, 225 to 400, 225 to 425, 225 to 450, 225 to 475, 225 to 500, 250 to 275, 250 to 300, 275 to 300, 275 to 325, 275 to 350, 275 to 375, 275 to 400, 275 to 425, 275 to 450, 275 to 475, 275 to 500, 300 to 325, 300 to 350, 300 to 375, 300 to 400, 300 to 425, 300 to 450, 300 to 475, 300 to 500, 325 to 350, 325 to 375, 325 to 400, 325 to 425, 325 to 450, 325 to 475, 325 to 500, 350 to 375, 350 to 400, 350 to 425, 350 to 450, 350 to 475, 350 to 500, 375 to 400, 375 to 425, 375 to 450, 375 to 475, 375 to 500, 400 to 425, 400 to 450, 400 to 475, 400 to 500, 425 to 450, 425 to 475, 425 to 500, 450 to 475, 450 to 500, or 475 to 500 nucleotides in length. In some embodiments, the second editing template comprises a region that does not have complementarity to the first editing template, wherein the region is about 1, 2, 3, 4, 5, 6, 7, 8, 9, 10, 11, 12, 13, 14, 15, 16, 17, 18, 19, 20, 21, 22, 23, 24, 25, 30, 35, 40, 45, 50, 60, 70, 80, 90, 100, 110, 120, 130, 140, 150, 160, 170, 180, 190, 200, 210, 220, 230, 240, 250, 260, 270, 280, 290, 300, 310, 320, 330, 340, 350, 360, 370, 380, 390, 400, 410, 420, 430, 440, 450, 460, 470, 480, 490, or 500 or more nucleotides in length.

[0356] In some embodiments, the RD comprises a region (or a subset) of the sequence of the IND. In some embodiments, the RD consists of a region of the sequence of the IND. In some embodiments, the RD comprises one or more intended nucleotide edits compared to the IND. In some embodiments, the RD comprises a region(s) that has substantial sequence identity to the sequence of the IND, wherein the region(s) comprises one or more nucleotide edits compared to the sequence of the IND. For example, the RD may comprise a region that has substantial sequence identity to the sequence of the IND, wherein the region comprises one or more nucleotide substitutions, insertions, or deletions. In some embodiments, the RD comprises a region of the sequence of the IND, and further comprises a region that does not have sequence identity or complementary to the IND. In some embodiments, the RD comprises a region that has substantial identity to the sequence of the IND comprising one or more nucleotide edits, and further comprises a region that does not have sequence identity or complementary to the IND. In some embodiments, the region that does not have sequence identity or complementary to the IND has a biological function or encodes a polypeptide or a portion thereof having a biological function. In some embodiments, the RD comprises one or more intended nucleotide edits compared to the IND and encodes a polypeptide or a portion thereof.

[0357] In some embodiments, the OD comprises a region (or a subset) of the sequence of the IND. In some embodiments, the OD consists of a region of the sequence of the IND. In some embodiments, the OD comprises one or more intended nucleotide edits compared to the IND. In some embodiments, the OD comprises a region(s) that has substantial sequence identity to the sequence of the IND, wherein the region(s) comprise one or more nucleotide edits compared to the sequence of the IND. For example, the OD may comprise a region that has substantial sequence identity to the sequence of the IND, wherein the region comprises one or more nucleotide substitutions, insertions, or deletions. In some embodiments, the OD comprises a region of the sequence of the IND, and further comprises a region that does not have sequence identity or complementary to the IND. In some embodiments, the OD comprises a region that has substantial identity to the sequence of the IND comprising one or more nucleotide edits, and further comprises a region that does not have sequence identity or complementarity to the IND. In some embodiments, the region that does not have sequence identity or complementarity to the IND has a biological function or encodes a polypeptide or a portion thereof having a biological function. In some embodiments, the OD comprises one or more intended nucleotide edits compared to the IND and encodes a polypeptide or a portion thereof.

[0358] In some embodiments, the IND comprises an array of nucleotide motifs. In some embodiments, the IND has an array of three nucleotide repeats (or tri-nucleotide repeats). In some embodiments, the IND has an array of 5-10, 5-15, 5-20, 5-25, 5-30, 5-35, 5-40, 5-50, 5-60, 5-70, 5-80, 5-90, 5-100, 20-30, 20-40, 20-50, 20-60, 20-70, 20-80, 20-90, 20-100, 35-40, 35-50, 35-60, 35-70, 35-80, 35-90, 35-100, 50-70, 50-80, 50-90, 50-100, 50-150, 50-200, 50-250, 50-300, 50-350, 50-400, 50-450, 50-500, 50-550, 50-600, 50-650, 50-700, 50-750, 50-800, 50-850, 50-900, 50-950, 50-1000, 50-1050, 50-1100, 50-1150, 50-1200, 50-1250, 50-1300, 50-1350, 50-1400, 50-1450, 50-1500, 100-150, 100-200, 100-250, 100-300, 100-350, 100-400, 100-450, 100-500, 100-550, 100-600, 100-650, 100-700, 100-750, 100-800, 100-850, 100-900, 100-950, 100-1000, 100-1050, 100-1100, 100-1150, 100-1200, 100-1250, 100-1300, 100-1350, 100-1400, 100-1450, 100-1500, 150-200, 150-250, 150-300, 150-350, 150-400, 150-450, 150-500, 150-550, 150-600, 150-650, 150-700, 150-750, 150-800, 150-850, 150-900, 150-950, 150-1000, 150-1050, 150-1100, 150-1150, 150-1200, 150-1250, 150-1300, 150-1350, 150-1400, 150-1450, 150-1500, 200-250, 200-300, 200-350, 200-400, 200-450, 200-500, 200-550, 200-600, 200-650, 200-700, 200-750, 200-800, 200-850, 200-900, 200-950, 200-1000, 200-1050, 200-1100, 200-1150, 200-1200, 200-1250, 200-1300, 200-1350, 200-1400, 200-1450, 200-1500, 250-300, 250-350, 250-400, 250-450, 250-500, 250-550, 250-600, 250-650, 250-700, 250-750, 250-800, 250-850, 250-900, 250-950, 250-1000, 250-1050, 250-1100, 250-1150, 250-1200, 250-1250, 250-1300, 250-1350, 250-1400, 250-1450, 250-1500, 300-350, 300-400, 300-450, 300-500, 300-550, 300-600, 300-650, 300-700, 300-750, 300-800, 300-850, 300-900, 300-950, 300-1000, 300-1050, 300-1100, 300-1150, 300-1200, 300-1250, 300-1300, 300-1350, 300-1400, 300-1450, 300-1500, 400-450, 400-500, 400-550, 400-600, 400-650, 400-700, 400-750, 400-800, 400-850, 400-900, 400-950, 400-1000, 400-1050, 400-1100, 400-1150, 400-1200, 400-1250, 400-1300, 400-1350, 400-1400, 400-1450, 400-1500, 500-550, 500-600, 500-650, 500-700, 500-750, 500-800, 500-850, 500-900, 500-950, 500-1000, 500-1050, 500-1100, 500-1150, 500-1200, 500-1250, 500-1300, 500-1350, 500-1400, 500-1450, 500-1500, 600-650, 600-700, 600-750, 600-800, 600-850, 600-900, 600-950, 600-1000, 600-1050, 600-1100, 600-1150, 600-1200, 600-1250, 600-1300, 600-1350, 600-1400, 600-1450, 600-1500, 700-750, 700-800, 700-850, 700-900, 700-950, 700-1000, 700-1050, 700-1100, 700-1150, 700-1200, 700-1250, 700-1300, 700-1350, 700-1400, 700-1450, 700-1500, 800-850, 800-900, 800-950, 800-1000, 800-1050, 800-1100, 800-1150, 800-1200, 800-1250, 800-1300, 800-1350, 800-1400, 800-1450, 800-1500, 900-950, 900-1000, 900-1050, 900-1100, 900-1150, 900-1200, 900-1250, 900-1300, 900-1350, 900-1400, 900-1450, 900-1500, 1000-1050, 1000-1100, 1000-1150, 1000-1200, 1000-1250, 1000-1300, 1000-1350, 1000-1400, 1000-1450, 1000-1500, 1100-1200, 1100-1300, 1100-1400, 1100-1500, 1200-1300, 1200-1400, 1200-1500, 1300-1400, 1300-1500, or 1400-1500 tri-nucleotide repeats. In some embodiments, the IND has an array of more than 100, 200, 300, 400, 500, 600, 700, 800, 900, or 1000 repeats. In some embodiments, the IND has an array of more than 1000 repeats. In some embodiments, the IND has an array of more than 1500 repeats. In some embodiments, the IND has an array of 35-50 CTG repeats. In some embodiments, the IND has an array of 35-49 CTG repeats. In some embodiments, the IND has an array of 50-1000 CTG repeats. In some embodiments, the IND has an array of 100-1000 CTG repeats. In some embodiments, the IND has an array of 50-150 CTG repeats. In some embodiments, the IND has an array of more than 1000 CTG repeats.

[0359] In some embodiments, the first editing template comprises a region of identity to a sequence adjacent to the second nick site on the second PAM strand of the double stranded target DNA, wherein the sequence is outside the IND. In some embodiments, the second editing template comprises a region of identity to a sequence adjacent to the first nick site on the first PAM strand of the double stranded target DNA, wherein the sequence is outside the IND. Accordingly, in some embodiments, the first newly synthesized single stranded DNA encoded by the first editing template comprises a region of complementarity to a sequence adjacent to the second nick site on the second PAM strand of the double stranded target DNA, wherein the sequence is outside the IND. In some embodiments, the second newly synthesized single stranded DNA encoded by the second editing template comprises a region of complementarity to a sequence adjacent to the first nick site on the first PAM strand of the double stranded target DNA, wherein the sequence is outside the IND.

[0360] In some embodiments, the first newly synthesized single stranded DNA comprises a region of complementarity to a sequence immediately adjacent to the second nick site on the second PAM strand of the double stranded target DNA, wherein the sequence is outside the IND. In some embodiments, the second newly synthesized single stranded DNA encoded by the second editing template comprises a region of complementarity to a sequence immediately adjacent to the first nick site on the first PAM strand of the double stranded target DNA, wherein the sequence is outside the IND (see, e.g., FIG. 4F).

[0361] In some embodiments, the first newly synthesized single stranded DNA comprises a region of complementarity to a sequence adjacent to the second nick site on the second PAM strand of the double stranded target DNA, wherein the sequence is outside the IND, and is 1, 2, 3, 4, 5, 6, 7, 8, 9, or 10 nucleotides apart from the second nick site. In some embodiments, the second newly synthesized single stranded DNA encoded by the second editing template comprises a region of complementarity to a sequence adjacent to the first nick site on the first PAM strand of the double stranded target DNA, wherein the sequence is outside the IND, and is 1, 2, 3, 4, 5, 6, 7, 8, 9, or 10 nucleotides apart from the first nick site.

[0362] In some embodiments, the IND consists of all tri-nucleotide repeats of the double stranded target DNA, e.g. the DMPK gene. In some embodiments, through prime editing and DNA repair, the IND is excised, and the tri-nucleotide repeats are deleted from the double stranded target DNA, e.g., the DMPK gene.

[0363] In some embodiments, the IND comprises the tri-nucleotide repeats of the double stranded target DNA, and further comprises one or more base pairs upstream and/or downstream of the tri-nucleotide repeats of the double stranded target DNA, e.g., the DMPK gene. In some embodiments, through prime editing and DNA repair, the IND is excised, and the array of tri-nucleotide repeats, along with the one or more base pairs upstream and/or downstream of the array of tri-nucleotide repeats are deleted from the double stranded target DNA, e.g., the DMPK gene. Accordingly, in some embodiments, incorporation of the first newly synthesized single stranded DNA and the second newly synthesized single stranded DNA results in incorporation of one or more intended nucleotide edits, which comprise deletion of the array of the tri-nucleotide repeat sequence. In some embodiments, incorporation of the first newly synthesized single stranded DNA and the second newly synthesized single stranded DNA results incorporation of one or more intended nucleotide edits, which comprise deletion of the array of the tri-nucleotide repeat sequence and deletion of the one or more base pairs upstream and/or downstream of the array of trinucleotide repeat sequence.

[0364] In some embodiments, the first editing template and the second editing template each comprises a region of complementarity or substantial complementarity to each other. In some embodiments, the first editing template comprises a sequence that is exogenous to the double stranded target DNA. In some embodiments, the second editing template comprise a sequence that is exogenous to the double stranded target DNA. In some embodiments, the sequence in the first editing template that is exogenous to the double stranded target DNA comprises a region of complementarity or substantial complementarity to the sequence in the second editing template that is exogenous to the double stranded target DNA. In some embodiments, the sequence in the first editing template that is exogenous to the double stranded target DNA further comprises a region that is not complementary to the sequence in the second editing template that is exogenous to the double stranded target DNA. In some embodiments, the sequence in the second editing template that is exogenous to the double stranded target DNA comprises a region of complementarity or substantial complementarity to the sequence in the first editing template that is exogenous to the double stranded target DNA. In some embodiments, the sequence in the second editing template that is exogenous to the double stranded target DNA further comprises a region that is not complementary to the sequence in the first editing template that is exogenous to the double stranded target DNA. In some embodiments, the first editing template comprises a sequence exogenous to the double stranded target DNA, wherein the sequence exogenous to the double stranded target DNA comprises a polynucleotide sequence that encodes an expression tag, for example, an affinity tag, a His tag, a V5 tag, or a FLAG tag. In some embodiments, the first editing template comprises a sequence exogenous to the double stranded target DNA, wherein the sequence exogenous to the double stranded target DNA comprises an attB or an attP sequence. In some embodiments, the second editing template comprises a sequence exogenous to the double stranded target DNA, wherein the sequence exogenous to the double stranded target DNA comprises a polynucleotide sequence that encodes an expression tag, for example, an affinity tag, a His tag, a V5 tag, or a FLAG tag.

[0365] Accordingly, in some embodiments, the first newly synthesized single stranded DNA and the second newly synthesized single stranded DNA each comprises a region of complementarity or substantial complementarity to each other. In some embodiments, the first newly synthesized single stranded DNA comprise a sequence that is exogenous to the double stranded target DNA. In some embodiments, the second newly synthesized single stranded DNA comprise a sequence that is exogenous to the double stranded target DNA. In some embodiments, the sequence in the first newly synthesized single stranded DNA that is exogenous to the double stranded target DNA comprises a region of complementarity or substantial complementarity to the sequence in the second newly synthesized single stranded DNA that is exogenous to the double stranded target DNA. In some embodiments, the sequence in the first newly synthesized single stranded DNA that is exogenous to the double stranded target DNA further comprises a region that is not complementary to the sequence in the second newly synthesized single stranded DNA that is exogenous to the double stranded target DNA. In some embodiments, the sequence in the second newly synthesized single stranded DNA that is exogenous to the double stranded target DNA comprises a region of complementarity or substantial complementarity to the sequence in the first newly synthesized single stranded DNA that is exogenous to the double stranded target DNA. In some embodiments, the sequence in the second newly synthesized single stranded DNA that is exogenous to the double stranded target DNA further comprises a region that is not complementary to the sequence in the first newly synthesized single stranded DNA that is exogenous to the double stranded target DNA.

[0366] Accordingly, in some embodiments, the first newly synthesized single stranded DNA and the second newly synthesized single stranded DNA form an OD that comprises a sequence that is exogenous to the double stranded target DNA, e.g. the DMPK gene. In some embodiments, the first newly synthesized single stranded DNA and the second newly synthesized single stranded DNA form an RD that comprises a sequence that is exogenous to the double stranded target DNA, e.g. the DMPK gene. In some embodiments, the IND comprises substantially all or all tri-nucleotide repeats of the double stranded target DNA, e.g. the DMPK gene. Through prime editing, in some embodiments, the IND is excised and is replaced by the RD. In some embodiments, the IND is excised and is replaced by the RD. Accordingly, in some embodiments, substantially all or all tri-nucleotide repeats of the double stranded target DNA, e.g., the DMPK gene, are deleted and replaced by the sequence exogenous to the double stranded target DNA, e.g., the DMPK gene. In some embodiments, the sequence exogenous to the double stranded target DNA comprises a polynucleotide sequence that encodes an expression tag, for example, an affinity tag, a His tag, a V5 tag, or a FLAG tag. In some embodiments, the sequence exogenous to the double stranded target DNA comprises an attB or an attP sequence. Accordingly, in some embodiments, incorporation of the one or more intended nucleotide edits comprises deletion of array of the tri-nucleotide repeat sequence and incorporation of one or more exogenous sequences encoded by the first editing template and/or the second editing template.

[0367] In some embodiments, the first editing template comprises a sequence that has complementarity or substantial complementarity to an endogenous sequence of the double stranded target DNA, e.g., the DMPK gene. In some embodiments, the second editing template comprises a sequence that has complementarity or substantial complementarity to an endogenous sequence of the double stranded target DNA, e.g., the DMPK gene. In some embodiments, the first and/or the second editing template comprises a sequence that has complementarity or substantial complementarity to an endogenous sequence of the double stranded target gene, e.g., the DMPK gene, wherein the endogenous sequence of the double stranded target DNA, e.g., the DMPK gene does not comprise the array of CTG tri-nucleotide repeat of the double stranded target DNA, e.g., the DMPK gene. In some embodiments, the endogenous sequence of the double stranded target DNA, e.g., the DMPK gene, that has complementarity or substantial complementarity to the first and/or the second editing template does not comprise an array of tri-nucleotide repeat or any nucleotide repeat structure. In some embodiments, the first editing template comprises a sequence that has complementarity or substantial complementarity to an endogenous sequence on the second strand of the double stranded target DNA, e.g., the DMPK gene, wherein the endogenous sequence of the double stranded target DNA, e.g., the DMPK gene, is upstream of the array of tri-nucleotide repeats. In some embodiments, the first editing template comprises a sequence that has complementarity or substantial complementarity to an endogenous sequence on the second strand of the double stranded target DNA, e.g., the DMPK gene, wherein the endogenous sequence of the double stranded target DNA, e.g., the DMPK gene, is downstream of the array of tri-nucleotide repeats.

[0368] In some embodiments, the second editing template comprises a sequence that has complementarity or substantial complementarity to an endogenous sequence on the first strand of the double stranded target DNA, e.g., the DMPK gene, wherein the endogenous sequence of the double stranded target DNA, e.g., the DMPK gene, is upstream of the array of tri-nucleotide repeats. In some embodiments, the second editing template comprises a sequence that has complementarity or substantial complementarity to an endogenous sequence on the first strand of the double stranded target DNA, e.g., the DMPK gene, wherein the endogenous sequence of the double stranded target DNA, e.g., the DMPK gene, is downstream of the array of tri-nucleotide repeats.

[0369] In some embodiments, the first editing template comprises a sequence that has complementarity or substantial complementarity to an endogenous sequence on the second strand of the double stranded target DNA that is upstream of the array of the trinucleotide-repeats, wherein the endogenous sequence is 2, 3, 4, 5, 6, 7, 8, 9, 10, 11, 12, 13, 14, 15, 16, 17, 18, 19, 20, 21, 22, 23, 24, 25, 26, 27, 28, 29, 30, 31, 32, 33, 34, 35, 36, 37, 38, 39, 40, 41, 42, 43, 44, 45, 46, 47, 48, 49, 50, 51, 52, 53, 54, 55, 56, 57, 58, 59, 60, 61, 62, 63, 64, 65, 66, 67, 68, 69, 70, 71, 72, 73, 74, 75, 76, 77, 78, 79, 80, 81, 82, 83, 84, 85, 86, 87, 88, 89, 90, 91, 92, 93, 94, 95, 96, 97, 98, 99, or 100 nucleotides in length.

[0370] In some embodiments, the first editing template comprises a sequence that has complementarity or substantial complementarity to an endogenous sequence on the second strand of the double stranded target DNA that is downstream of the array of the trinucleotide-repeats, wherein the endogenous sequence is 2, 3, 4, 5, 6, 7, 8, 9, 10, 11, 12, 13, 14, 15, 16, 17, 18, 19, 20, 21, 22, 23, 24, 25, 26, 27, 28, 29, 30, 31, 32, 33, 34, 35, 36, 37, 38, 39, 40, 41, 42, 43, 44, 45, 46, 47, 48, 49, 50, 51, 52, 53, 54, 55, 56, 57, 58, 59, 60, 61, 62, 63, 64, 65, 66, 67, 68, 69, 70, 71, 72, 73, 74, 75, 76, 77, 78, 79, 80, 81, 82, 83, 84, 85, 86, 87, 88, 89, 90, 91, 92, 93, 94, 95, 96, 97, 98, 99, or 100 nucleotides in length.

[0371] In some embodiments, the first editing template comprises a sequence that has complementarity or substantial complementarity to an endogenous sequence on the second strand of the double stranded target DNA that is upstream of the array of the trinucleotide-repeats, wherein the endogenous sequence is 2, 3, 4, 5, 6, 7, 8, 9, 10, 11, 12, 13, 14, 15, 16, 17, 18, 19, 20, 21, 22, 23, 24, 25, 26, 27, 28, 29, 30, 31, 32, 33, 34, 35, 36, 37, 38, 39, 40, 41, 42, 43, 44, 45, 46, 47, 48, 49, 50, 51, 52, 53, 54, 55, 56, 57, 58, 59, 60, 61, 62, 63, 64, 65, 66, 67, 68, 69, 70, 71, 72, 73, 74, 75, 76, 77, 78, 79, 80, 81, 82, 83, 84, 85, 86, 87, 88, 89, 90, 91, 92, 93, 94, 95, 96, 97, 98, 99, 100, 125, 150, 175, 200, 250, 300, 350, 400, 450, 500 or more nucleotides upstream of the array of the tri-nucleotide repeats as measured at the 5′ ends. In some embodiments, the first editing template comprises a sequence that has complementarity or substantial complementarity to an endogenous sequence on the second strand of the double stranded target DNA that is downstream of the array of the trinucleotide-repeats, wherein the endogenous sequence is 2, 3, 4, 5, 6, 7, 8, 9, 10, 11, 12, 13, 14, 15, 16, 17, 18, 19, 20, 21, 22, 23, 24, 25, 26, 27, 28, 29, 30, 31, 32, 33, 34, 35, 36, 37, 38, 39, 40, 41, 42, 43, 44, 45, 46, 47, 48, 49, 50, 51, 52, 53, 54, 55, 56, 57, 58, 59, 60, 61, 62, 63, 64, 65, 66, 67, 68, 69, 70, 71, 72, 73, 74, 75, 76, 77, 78, 79, 80, 81, 82, 83, 84, 85, 86, 87, 88, 89, 90, 91, 92, 93, 94, 95, 96, 97, 98, 99, 100, 125, 150, 175, 200, 250, 300, 350, 400, 450, 500 or more nucleotides downstream of the array of the tri-nucleotide repeats as measured at the 5′ ends.

[0372] In some embodiments, the second editing template comprises a sequence that has complementarity or substantial complementarity to an endogenous sequence on the first strand of the double stranded target DNA that is upstream of the array of the trinucleotide-repeats, wherein the endogenous sequence is 2, 3, 4, 5, 6, 7, 8, 9, 10, 11, 12, 13, 14, 15, 16, 17, 18, 19, 20, 21, 22, 23, 24, 25, 26, 27, 28, 29, 30, 31, 32, 33, 34, 35, 36, 37, 38, 39, 40, 41, 42, 43, 44, 45, 46, 47, 48, 49, 50, 51, 52, 53, 54, 55, 56, 57, 58, 59, 60, 61, 62, 63, 64, 65, 66, 67, 68, 69, 70, 71, 72, 73, 74, 75, 76, 77, 78, 79, 80, 81, 82, 83, 84, 85, 86, 87, 88, 89, 90, 91, 92, 93, 94, 95, 96, 97, 98, 99, or 100 nucleotides in length.

[0373] In some embodiments, the second editing template comprises a sequence that has complementarity or substantial complementarity to an endogenous sequence on the first strand of the double stranded target DNA that is downstream of the array of the trinucleotide-repeats, wherein the endogenous sequence is 2, 3, 4, 5, 6, 7, 8, 9, 10, 11, 12, 13, 14, 15, 16, 17, 18, 19, 20, 21, 22, 23, 24, 25, 26, 27, 28, 29, 30, 31, 32, 33, 34, 35, 36, 37, 38, 39, 40, 41, 42, 43, 44, 45, 46, 47, 48, 49, 50, 51, 52, 53, 54, 55, 56, 57, 58, 59, 60, 61, 62, 63, 64, 65, 66, 67, 68, 69, 70, 71, 72, 73, 74, 75, 76, 77, 78, 79, 80, 81, 82, 83, 84, 85, 86, 87, 88, 89, 90, 91, 92, 93, 94, 95, 96, 97, 98, 99, or 100 nucleotides in length.

[0374] In some embodiments, the second editing template comprises a sequence that has complementarity or substantial complementarity to an endogenous sequence on the first strand of the double stranded target DNA that is upstream of the array of the trinucleotide-repeats, wherein the endogenous sequence is 2, 3, 4, 5, 6, 7, 8, 9, 10, 11, 12, 13, 14, 15, 16, 17, 18, 19, 20, 21, 22, 23, 24, 25, 26, 27, 28, 29, 30, 31, 32, 33, 34, 35, 36, 37, 38, 39, 40, 41, 42, 43, 44, 45, 46, 47, 48, 49, 50, 51, 52, 53, 54, 55, 56, 57, 58, 59, 60, 61, 62, 63, 64, 65, 66, 67, 68, 69, 70, 71, 72, 73, 74, 75, 76, 77, 78, 79, 80, 81, 82, 83, 84, 85, 86, 87, 88, 89, 90, 91, 92, 93, 94, 95, 96, 97, 98, 99, 100, 125, 150, 175, 200, 250, 300, 350, 400, 450, 500 or more nucleotides upstream of the array of the tri-nucleotide repeats as measured at the 5′ ends.

[0375] In some embodiments, the second editing template comprises a sequence that has complementarity or substantial complementarity to an endogenous sequence on the first strand of the double stranded target DNA that is downstream of the array of the trinucleotide-repeats, wherein the endogenous sequence is 2, 3, 4, 5, 6, 7, 8, 9, 10, 11, 12, 13, 14, 15, 16, 17, 18, 19, 20, 21, 22, 23, 24, 25, 26, 27, 28, 29, 30, 31, 32, 33, 34, 35, 36, 37, 38, 39, 40, 41, 42, 43, 44, 45, 46, 47, 48, 49, 50, 51, 52, 53, 54, 55, 56, 57, 58, 59, 60, 61, 62, 63, 64, 65, 66, 67, 68, 69, 70, 71, 72, 73, 74, 75, 76, 77, 78, 79, 80, 81, 82, 83, 84, 85, 86, 87, 88, 89, 90, 91, 92, 93, 94, 95, 96, 97, 98, 99, 100, 125, 150, 175, 200, 250, 300, 350, 400, 450, 500 or more nucleotides downstream of the array of the tri-nucleotide repeats as measured at the 5′ ends.

[0376] In some embodiments, the sequence of the first editing template that has complementarity or substantial complementarity to an endogenous sequence of the double stranded target DNA comprises a region of complementarity or substantial complementarity to the sequence of the second editing template that has complementarity or substantial complementarity to an endogenous sequence of the double stranded target DNA. In some embodiments, the sequence of the first editing template that complementarity or substantial complementarity to an endogenous sequence of the double stranded target DNA further comprises a region that is not complementary to the sequence of the second editing template that has complementarity or substantial complementarity to an endogenous sequence of the double stranded target DNA. In some embodiments, the sequence of the second editing template that has complementarity or substantial complementarity to an endogenous sequence of the double stranded target DNA comprises a region of complementarity or substantial complementarity to the sequence of the first editing template that has complementarity or substantial complementarity to an endogenous sequence of the double stranded target DNA. In some embodiments, the sequence of the second editing template that has complementarity or substantial complementarity to an endogenous sequence of the double stranded target DNA further comprises a region that is not complementary to the sequence of the first editing template that has identity or substantial identity to an endogenous sequence of the double stranded target DNA.

[0377] Accordingly, in some embodiments, the first newly synthesized single stranded DNA comprises a sequence that has identity or substantial identity to an endogenous sequence of the double stranded target DNA, e.g., the DMPK gene. In some embodiments, the second newly synthesized single stranded DNA comprises a sequence that has identity or substantial identity to an endogenous sequence of the double stranded target DNA, e.g., the DMPK gene. In some embodiments, the first newly synthesized single stranded DNA and/or the second newly synthesized single stranded DNA comprises a sequence that has identity or substantial identity to an endogenous sequence of the double stranded target DNA, e.g., the DMPK gene, wherein the endogenous sequence of the double stranded target DNA, e.g., the DMPK gene does not comprise the array of tri-nucleotide repeat of the double stranded target DNA, e.g., the DMPK gene. In some embodiments, the first newly synthesized single stranded DNA comprises a sequence that has identity or substantial identity to an endogenous sequence on the second strand of the double stranded target DNA, e.g., the DMPK gene, wherein the endogenous sequence of the double stranded target DNA, e.g., the DMPK gene, is upstream of the array of tri-nucleotide repeats. In some embodiments, the first newly synthesized single stranded DNA comprises a sequence that has identity or substantial identity to an endogenous sequence on the second strand of the double stranded target DNA, e.g., the DMPK gene, wherein the endogenous sequence of the double stranded target DNA, e.g., the DMPK gene, is downstream of the array of tri-nucleotide repeats. In some embodiments, the second newly synthesized single stranded DNA comprises a sequence that has identity or substantial identity to an endogenous sequence on the first strand of the double stranded target DNA, e.g., the DMPK gene, wherein the endogenous sequence of the double stranded target DNA, e.g., the DMPK gene, is upstream of the array of tri-nucleotide repeats. In some embodiments, the second newly synthesized single stranded DNA comprises a sequence that has identity or substantial identity to an endogenous sequence on the first strand of the double stranded target DNA, e.g., the DMPK gene, wherein the endogenous sequence of the double stranded target DNA, e.g., the DMPK gene, is downstream of the array of tri-nucleotide repeats.

[0378] In some embodiments, the array of tri-nucleotide repeats of the DMPK gene is an array of CTG repeats on the coding strand (the second strand) or the reverse complement CAG repeats on the non-coding strand (the first strand).

[0379] In some embodiments, the sequence of the first newly synthesized single stranded DNA that has identity or substantial identity to an endogenous sequence of the double stranded target DNA comprises a region of complementarity or substantial complementarity to the sequence of the second newly synthesized single stranded DNA that has identity or substantial identity to an endogenous sequence of the double stranded target DNA. In some embodiments, the sequence of the first newly synthesized single stranded DNA that has identity or substantial identity to an endogenous sequence of the double stranded target DNA further comprises a region that is not complementary to the sequence of the second newly synthesized single stranded DNA that has identity or substantial identity to an endogenous sequence of the double stranded target DNA. In some embodiments, the sequence of the second newly synthesized single stranded DNA that has identity or substantial identity to an endogenous sequence of the double stranded target DNA comprises a region of complementarity or substantial complementarity to the sequence of the first newly synthesized single stranded DNA that has identity or substantial identity to an endogenous sequence of the double stranded target DNA. In some embodiments, the sequence of the second newly synthesized single stranded DNA that has identity or substantial identity to an endogenous sequence of the double stranded target DNA further comprises a region that is not complementary to the sequence of the first newly synthesized single stranded DNA that has identity or substantial identity to an endogenous sequence of the double stranded target DNA.

[0380] Accordingly, in some embodiments, the first newly synthesized single stranded DNA and the second newly synthesized single stranded DNA form an OD that comprises an endogenous sequence of the double stranded target DNA, e.g. the DMPK gene. In some embodiments, the first newly synthesized single stranded DNA and the second newly synthesized single stranded DNA form an RD that comprises an endogenous sequence of the double stranded target DNA, e.g. the DMPK gene. In some embodiments, the RD or the OD comprises an endogenous sequence of the double stranded target DNA, e.g., the DMPK gene, that is upstream of the array of tri-nucleotide repeats. In some embodiments, the RD or the OD comprises an endogenous sequence of the double stranded target DNA, e.g., the DMPK gene, that is downstream of the array of tri-nucleotide repeats. In some embodiments, the RD or the OD comprises a sequence that is endogenous compared to the double stranded target DNA, e.g., the DMPK gene, wherein the sequence comprises two regions: a) a region that is identical or substantially identical to an endogenous sequence upstream of the array of the tri-nucleotide repeats, and b) a region that is identical or substantially identical to an endogenous sequence downstream of the array of the tri-nucleotide repeats. In some embodiments, the region identical or substantially identical to the endogenous sequence upstream of the array of the trinucleotide-repeats is 2, 3, 4, 5, 6, 7, 8, 9, 10, 11, 12, 13, 14, 15, 16, 17, 18, 19, 20, 21, 22, 23, 24, 25, 26, 27, 28, 29, 30, 31, 32, 33, 34, 35, 36, 37, 38, 39, 40, 41, 42, 43, 44, 45, 46, 47, 48, 49, 50, 51, 52, 53, 54, 55, 56, 57, 58, 59, 60, 61, 62, 63, 64, 65, 66, 67, 68, 69, 70, 71, 72, 73, 74, 75, 76, 77, 78, 79, 80, 81, 82, 83, 84, 85, 86, 87, 88, 89, 90, 91, 92, 93, 94, 95, 96, 97, 98, 99, or 100 base pairs in length. In some embodiments, the region identical or substantially identical to the endogenous sequence downstream of the array of the trinucleotide-repeats is 2, 3, 4, 5, 6, 7, 8, 9, 10, 11, 12, 13, 14, 15, 16, 17, 18, 19, 20, 21, 22, 23, 24, 25, 26, 27, 28, 29, 30, 31, 32, 33, 34, 35, 36, 37, 38, 39, 40, 41, 42, 43, 44, 45, 46, 47, 48, 49, 50, 51, 52, 53, 54, 55, 56, 57, 58, 59, 60, 61, 62, 63, 64, 65, 66, 67, 68, 69, 70, 71, 72, 73, 74, 75, 76, 77, 78, 79, 80, 81, 82, 83, 84, 85, 86, 87, 88, 89, 90, 91, 92, 93, 94, 95, 96, 97, 98, 99, or 100 base pairs in length. In some embodiments, the region identical or substantially identical to the endogenous sequence upstream of the array of the trinucleotide-repeats is 2, 3, 4, 5, 6, 7, 8, 9, 10, 11, 12, 13, 14, 15, 16, 17, 18, 19, 20, 21, 22, 23, 24, 25, 26, 27, 28, 29, 30, 31, 32, 33, 34, 35, 36, 37, 38, 39, 40, 41, 42, 43, 44, 45, 46, 47, 48, 49, 50, 51, 52, 53, 54, 55, 56, 57, 58, 59, 60, 61, 62, 63, 64, 65, 66, 67, 68, 69, 70, 71, 72, 73, 74, 75, 76, 77, 78, 79, 80, 81, 82, 83, 84, 85, 86, 87, 88, 89, 90, 91, 92, 93, 94, 95, 96, 97, 98, 99, 100, 125, 150, 175, 200, 250, 300, 350, 400, 450, 500 or more base pairs upstream of the array of the tri-nucleotide repeats as measured at the 5′ ends. In some embodiments, the region identical or substantially identical to the endogenous sequence upstream of the array of the trinucleotide-repeats is 2, 3, 4, 5, 6, 7, 8, 9, 10, 11, 12, 13, 14, 15, 16, 17, 18, 19, 20, 21, 22, 23, 24, 25, 26, 27, 28, 29, 30, 31, 32, 33, 34, 35, 36, 37, 38, 39, 40, 41, 42, 43, 44, 45, 46, 47, 48, 49, 50, 51, 52, 53, 54, 55, 56, 57, 58, 59, 60, 61, 62, 63, 64, 65, 66, 67, 68, 69, 70, 71, 72, 73, 74, 75, 76, 77, 78, 79, 80, 81, 82, 83, 84, 85, 86, 87, 88, 89, 90, 91, 92, 93, 94, 95, 96, 97, 98, 99, 100, 125, 150, 175, 200, 250, 300, 350, 400, 450, 500 or more base pairs downstream of the array of the tri-nucleotide repeats as measured at the 5′ ends. In some embodiments, the array of tri-nucleotide repeats of the DMPK gene is an array of CTG (or CAG) repeats.

[0381] In some embodiments, the IND comprises all tri-nucleotide repeats of the double stranded target DNA, e.g. the entire array of CTG (or the reverse complement CAG) repeats of the DMPK gene. In some embodiments, the IND comprises all tri-nucleotide repeats of the double stranded target DNA, e.g. the entire array of CTG (or CAG) repeats of the DMPK gene, and further comprises one or more base pairs upstream and/or downstream of the array of tri-nucleotide repeats. Through prime editing, the IND is excised and is replaced by the RD or the OD. Accordingly, in some embodiments, all tri-nucleotide repeats of the double stranded target DNA, e.g., the entire array of CTG (or CAG) repeats of the DMPK gene, are deleted, and the endogenous sequence upstream of the array of tri-nucleotide repeats is retained. In some embodiments, all tri-nucleotide repeats of the double stranded target DNA, e.g. the entire array of CTG (or CAG) repeats of the DMPK gene are deleted, and the endogenous sequence downstream of the array of tri-nucleotide repeats is retained. In some embodiments, the IND comprises all tri-nucleotide repeats of the double stranded target DNA, e.g. the DMPK gene. In some embodiments, the first editing template has a different number of tri-nucleotide repeats compared to the number of tri-nucleotide repeats in the IND. In some embodiments, the first editing template has a reduced number of tri-nucleotide repeats compared to the number of tri-nucleotide repeats in the IND. In some embodiments, the second editing template has a different number of tri-nucleotide repeats compared to the number of tri-nucleotide repeats in the IND. In some embodiments, the second editing template has a reduced number of tri-nucleotide repeats compared to the number of tri-nucleotide repeats in the IND.

[0382] Accordingly, in some embodiments, the first newly synthesized single stranded DNA encoded by the first editing template has a different number of tri-nucleotide repeats compared to the number of tri-nucleotide repeats in the IND. In some embodiments, the first newly synthesized single stranded DNA encoded by the first editing template has a reduced number of tri-nucleotide repeats compared to the number of tri-nucleotide repeats in the IND. In some embodiments, the second newly synthesized single stranded DNA encoded by the second editing template has a different number of tri-nucleotide repeats compared to the number of tri-nucleotide repeats in the IND. In some embodiments, the second newly synthesized single stranded DNA encoded by the second editing template has a reduced number of tri-nucleotide repeats compared to the number of tri-nucleotide repeats in the IND. In some embodiments, the first newly synthesized single stranded DNA and the second newly synthesized single stranded DNA can form an OD or a RD that comprises a reduced number of tri-nucleotide repeats compared to the number of tri-nucleotide repeats in the IND.

[0383] In some embodiments, the OD has an array of the same nucleotide repeat motifs, for example, CTG repeats, but of a different number compared to the number of the tri-nucleotide repeats in the IND. In some embodiments, the RD has an array of the same nucleotide repeat motifs, for example, CTG repeats, but of a different number compared to the number of the tri-nucleotide repeats in the IND. In some embodiments, the OD has a reduced number of the tri-nucleotide repeats, e.g., CTG repeats compared to the endogenous number of tri-nucleotide repeats of the double stranded target DNA, e.g., the DMPK gene. In some embodiments, the RD has a reduced number of the tri-nucleotide repeats, e.g., CTG repeats, compared to the endogenous number of tri-nucleotide repeats of the double stranded target DNA, e.g., the DMPK gene. In some embodiments, the RD contains at most 30, 20, 10, or 5 CTG tri-nucleotide repeats. In some embodiments, the RD contains 30, 20, 10, or 5 CTG tri-nucleotide repeats. In some embodiments, the OD contains at most 30, 20, 10, or 5 CTG tri-nucleotide repeats. In some embodiments, the OD contains 30, 20, 10, or 5 CTG tri-nucleotide repeats. In some embodiments, the OD contains 5 CTG repeats. In some embodiments, the RD contains 5 CTG repeats. In some embodiments, the RD or the OD contains the same number of tri-nucleotide repeats as a reference gene, for example, a wild type DMPK gene.

[0384] Accordingly, in some embodiments, excision of the IND and incorporation of the RD results in deletion of a portion of the nucleotide repeats sequences of the IND from the double stranded target DNA, e.g., the target gene.

[0385] In some embodiments, excision of the IND and incorporation of the OD results in deletion of a portion of the nucleotide repeats sequences of the IND from the double stranded target DNA, e.g., the target gene. In some embodiments, the deletion comprises at least 1, 2, 3, 4, 5, 6, 7, 8, 9, 10, 11, 12, 13, 14, 15, 16, 17, 18, 19, 20 or more tri-nucleotide repeats. In some embodiments, the deletion comprises 1-3, 1-5, 1-10, 1-15, 1-20, 1-25, 1-30, 1-35, 1-40, 1-45, 1-50, 1-55, 1-60, 1-75 or more tri-nucleotide repeats. In some embodiments, the deletion comprises deletion of at least 1, 2, 3, 4, 5, 6, 7, 8, 9, 10, 11, 12, 13, 14, 15, 16, 17, 18, 19, 20 tri-nucleotide repeats from the double stranded target DNA, e.g., the target gene. In some embodiments, the deletion comprises deletion of 1-3, 1-5, 1-10, 1-15, 1-20, 1-25, 1-30, 1-35, 1-40, 1-45, 1-50, 1-55, 1-60, 1-75 or more tri-nucleotide repeats from the double stranded target DNA, e.g., the target gene. In some embodiments, the deletion comprises deletion of 5-10, 5-15, 5-20, 5-25, 5-30, 5-35, 5-40, 5-50, 5-60, 5-70, 5-80, 5-90, 5-100, 20-30, 20-40, 20-50, 20-60, 20-70, 20-80, 20-90, 20-100, 35-40, 35-50, 35-60, 35-70, 35-80, 35-90, 35-100, 50-70, 50-80, 50-90, 50-100, 50-150, 50-200, 50-250, 50-300, 50-350, 50-400, 50-450, 50-500, 50-550, 50-600, 50-650, 50-700, 50-750, 50-800, 50-850, 50-900, 50-950, 50-1000, 50-1050, 50-1100, 50-1150, 50-1200, 50-1250, 50-1300, 50-1350, 50-1400, 50-1450, 50-1500, 100-150, 100-200, 100-250, 100-300, 100-350, 100-400, 100-450, 100-500, 100-550, 100-600, 100-650, 100-700, 100-750, 100-800, 100-850, 100-900, 100-950, 100-1000, 100-1050, 100-1100, 100-1150, 100-1200, 100-1250, 100-1300, 100-1350, 100-1400, 100-1450, 100-1500, 150-200, 150-250, 150-300, 150-350, 150-400, 150-450, 150-500, 150-550, 150-600, 150-650, 150-700, 150-750, 150-800, 150-850, 150-900, 150-950, 150-1000, 150-1050, 150-1100, 150-1150, 150-1200, 150-1250, 150-1300, 150-1350, 150-1400, 150-1450, 150-1500, 200-250, 200-300, 200-350, 200-400, 200-450, 200-500, 200-550, 200-600, 200-650, 200-700, 200-750, 200-800, 200-850, 200-900, 200-950, 200-1000, 200-1050, 200-1100, 200-1150, 200-1200, 200-1250, 200-1300, 200-1350, 200-1400, 200-1450, 200-1500, 250-300, 250-350, 250-400, 250-450, 250-500, 250-550, 250-600, 250-650, 250-700, 250-750, 250-800, 250-850, 250-900, 250-950, 250-1000, 250-1050, 250-1100, 250-1150, 250-1200, 250-1250, 250-1300, 250-1350, 250-1400, 250-1450, 250-1500, 300-350, 300-400, 300-450, 300-500, 300-550, 300-600, 300-650, 300-700, 300-750, 300-800, 300-850, 300-900, 300-950, 300-1000, 300-1050, 300-1100, 300-1150, 300-1200, 300-1250, 300-1300, 300-1350, 300-1400, 300-1450, 300-1500, 400-450, 400-500, 400-550, 400-600, 400-650, 400-700, 400-750, 400-800, 400-850, 400-900, 400-950, 400-1000, 400-1050, 400-1100, 400-1150, 400-1200, 400-1250, 400-1300, 400-1350, 400-1400, 400-1450, 400-1500, 500-550, 500-600, 500-650, 500-700, 500-750, 500-800, 500-850, 500-900, 500-950, 500-1000, 500-1050, 500-1100, 500-1150, 500-1200, 500-1250, 500-1300, 500-1350, 500-1400, 500-1450, 500-1500, 600-650, 600-700, 600-750, 600-800, 600-850, 600-900, 600-950, 600-1000, 600-1050, 600-1100, 600-1150, 600-1200, 600-1250, 600-1300, 600-1350, 600-1400, 600-1450, 600-1500, 700-750, 700-800, 700-850, 700-900, 700-950, 700-1000, 700-1050, 700-1100, 700-1150, 700-1200, 700-1250, 700-1300, 700-1350, 700-1400, 700-1450, 700-1500, 800-850, 800-900, 800-950, 800-1000, 800-1050, 800-1100, 800-1150, 800-1200, 800-1250, 800-1300, 800-1350, 800-1400, 800-1450, 800-1500, 900-950, 900-1000, 900-1050, 900-1100, 900-1150, 900-1200, 900-1250, 900-1300, 900-1350, 900-1400, 900-1450, 900-1500, 1000-1050, 1000-1100, 1000-1150, 1000-1200, 1000-1250, 1000-1300, 1000-1350, 1000-1400, 1000-1450, 1000-1500, 1100-1200, 1100-1300, 1100-1400, 1100-1500, 1200-1300, 1200-1400, 1200-1500, 1300-1400, 1300-1500, or 1400-1500 tri-nucleotide repeats from the double stranded target DNA, e.g., the target gene. In some embodiments, the deletion comprises deletion of 100, 200, 300, 400, 500, 600, 700, 800, 900, or 1000 trinucleotide repeats from the double stranded target DNA, e.g., the target gene. In some embodiments, the deletion comprises deletion of more than 1000 trinucleotide repeats from the double stranded target DNA, e.g., the target gene.

[0386] In some embodiments, the first editing template has a reduced number of tri-nucleotide repeats compared to the number of tri-nucleotide repeats in the IND, and further comprises a region that is complementary or substantially complementary to a sequence on the second strand of the double stranded target DNA that is downstream of the array of tri-nucleotide repeats. In some embodiments, the first editing template has a reduced number of tri-nucleotide repeats compared to the number of tri-nucleotide repeats in the IND, and further comprises a) a region that is complementary or substantially complementary to a sequence on the second strand of the double stranded target DNA that is downstream of the array of tri-nucleotide repeats, and b) a region that is complementary or substantially complementary to a sequence on the second strand of the double stranded target DNA that is upstream of the array of tri-nucleotide repeats.

[0387] In some embodiments, the second editing template has a reduced number of tri-nucleotide repeats compared to the number of tri-nucleotide repeats in the IND, and further comprises a region that is complementary or substantially complementary to a sequence on the first strand of the double stranded target DNA that is upstream of the array of tri-nucleotide repeats. In some embodiments, the second editing template has a reduced number of tri-nucleotide repeats compared to the number of tri-nucleotide repeats in the IND, and further comprises a) a region that is complementary or substantially complementary to a sequence on the first strand of the double stranded target DNA that is upstream of the array of tri-nucleotide repeats, and b) a region that is complementary or substantially complementary to a sequence on the first strand of the double stranded target DNA that is downstream of the array of tri-nucleotide repeats.

[0388] Accordingly, in some embodiments, the first newly synthesized single stranded DNA encoded by the first editing template has a reduced number of tri-nucleotide repeats compared to the number of tri-nucleotide repeats in the IND, and further comprises a region that is identical or substantially identical to a sequence on the second strand of the double stranded target DNA that is downstream of the array of tri-nucleotide repeats. In some embodiments, the first newly synthesized single stranded DNA encoded by the first editing template has a reduced number of tri-nucleotide repeats compared to the number of tri-nucleotide repeats in the IND, and further comprises a) a region that is identical or substantially identical to a sequence on the second strand of the double stranded target DNA that is downstream of the array of tri-nucleotide repeats, and b) a region that is identical or substantially identical to a sequence on the second strand of the double stranded target DNA that is upstream of the array of tri-nucleotide repeats.

[0389] In some embodiments, the second newly synthesized single stranded DNA encoded by the second editing template has a reduced number of tri-nucleotide repeats compared to the number of tri-nucleotide repeats in the IND, and further comprises a region that is identical or substantially identical to a sequence on the first strand of the double stranded target DNA that is upstream of the array of tri-nucleotide repeats. In some embodiments, the second newly synthesized single stranded DNA encoded by the second editing template has a reduced number of tri-nucleotide repeats compared to the number of tri-nucleotide repeats in the IND, and further comprises a) a region that is identical or substantially identical to a sequence on the first strand of the double stranded target DNA that is upstream of the array of tri-nucleotide repeats, and b) a region that is identical or substantially identical to a sequence on the first strand of the double stranded target DNA that is downstream of the array of tri-nucleotide repeats.

[0390] Accordingly, in some embodiments, the RD or the OD has a reduced number of tri-nucleotide repeats compared to the number of tri-nucleotide repeats in the IND, and further comprises a double stranded sequence of the double stranded target DNA that is upstream or downstream of the IND. In some embodiments, the RD or the OD has a reduced number of tri-nucleotide repeats compared to the number of tri-nucleotide repeats in the IND, and further comprises a double stranded sequence of the double stranded target DNA that is upstream of the IND, and a double stranded sequence of the double stranded target DNA that is downstream of the IND.

[0391] In some embodiments, through prime editing, the IND is removed, and the sequence of the RD or the OD is incorporated into the double stranded target DNA. As a result, a portion of the trinucleotide repeats of the double stranded target DNA is deleted from the double stranded target DNA, e.g., the target gene, and the sequences flanking the array of tri-nucleotide repeats are retained.

[0392] In some embodiments, the first editing template and/or the second editing template is partially complementary, substantially complementary, or identical to the sequence of the IND. In some embodiments, for example, the first editing template comprises a region that is complementary or identical to a region of a sequence of the IND. In some embodiments, the first editing template comprises a region of complementarity to the sequence on the first PAM strand of the IND. In some embodiments, the first editing template further comprises a region of complementarity to the second editing template. In some embodiments, the first editing template is partially complementary, substantially complementary or identical to a sequence of the IND, and is also substantially complementary to the second editing template. In some embodiments, the second editing template comprises a region that is complementary or identical to a region of a sequence of the IND. In some embodiments, the second editing template comprises a region of complementarity to the sequence on the second PAM strand of the IND. In some embodiments, the second editing template further comprises a region of complementarity to the first editing template. In some embodiments, the second editing template is partially complementary, substantially complementary or identical to a sequence of the IND, and is also substantially complementary to the first editing template. In some embodiments, the first editing template and the second editing template each comprises a region of complementarity to a sequence of the IND.

[0393] The partially complementary region(s) in the first editing template and the second editing template can be in any position within the first editing template and the second editing template. Accordingly, in some embodiments, the first newly synthesized single stranded DNA encoded by the first editing template and the second newly synthesized single stranded DNA encoded by the second editing template are partially complementary to each other, at any position within the first newly synthesized single stranded DNA encoded by the first editing template and the second newly synthesized single stranded DNA encoded by the second editing template. In some embodiments, the first newly synthesized single stranded DNA comprises a region of complementarity to the first strand of the IND, at or near the 3′ end of the first newly synthesized single stranded DNA. In some embodiments, the first newly synthesized single stranded DNA comprises a region of complementarity to the first strand of the IND, at or near the 5′ end of the first newly synthesized single stranded DNA. In some embodiments, the first newly synthesized single stranded DNA comprises a region of complementarity to the first strand of the IND, in the middle of the first newly synthesized single stranded DNA. In some embodiments, the second newly synthesized single stranded DNA comprises a region of complementarity to the second strand of the IND, at or near the 3′ end of the second newly synthesized single stranded DNA. In some embodiments, the second newly synthesized single stranded DNA comprises a region of complementarity to the second strand of the IND, at or near the 5′ end of the second newly synthesized single stranded DNA. In some embodiments, the second newly synthesized single stranded DNA comprises a region of complementarity to the second strand of the IND, in the middle of the second newly synthesized single stranded DNA. In some embodiments, the first newly synthesized single stranded DNA and the second newly synthesized single stranded DNA each comprises a region of complementarity to each other at the 3′ end.

[0394] Accordingly, as exemplified in FIG. 4C-FIG. 4D, in some embodiments, the first newly synthesized single stranded DNA encoded by the first editing template comprises a region that is identical to a region of the sequence on the first PAM strand of the IND. In some embodiments, the second newly synthesized single stranded DNA encoded by the second editing template comprises a region that is identical to a region of the sequence on the second PAM strand of the IND. In some embodiments, the first newly synthesized single stranded DNA comprises two or more sub regions, each of which is identical to a sub region of the sequence on the first PAM strand of the IND (as exemplified in FIG. 4D). The sub regions on the first newly synthesized single stranded DNA and/or the first PAM strand of the IND may or may not be consecutive. For example, the first newly synthesized single stranded DNA may comprise 2 sub regions each identical to a sub region of the sequence on the first PAM strand of the IND, wherein the two sub regions of the sequence on the first PAM strand of the IND are separated by a region that does not have identity or substantial identity to the first newly synthesized single stranded DNA. In some embodiments, the second newly synthesized single stranded DNA comprises two or more sub regions, each of which is identical to a sub region of the sequence on the second PAM strand of the IND (as exemplified in FIG. 4D). The sub regions on the second newly synthesized single stranded DNA and/or the second PAM strand of the IND may or may not be consecutive. For example, the second newly synthesized single stranded DNA may comprise 2 sub regions each identical to a sub region of the sequence on the second PAM strand of the IND, wherein the two sub regions of the sequence on the second PAM strand of the IND are separated by a region that does not have identity or substantial identity to the second newly synthesized single stranded DNA.

[0395] In some embodiments, the region of the sequence on the first PAM strand of the IND and the region of the sequence on the second PAM strand of the IND are complementary to each other. In some embodiments, the first newly synthesized single stranded DNA encoded by the first editing template and the second newly synthesized single stranded DNA encoded by the second editing template are at least partially complementary to each other and can anneal to each other to form an OD. In some embodiments, the first newly synthesized single stranded DNA encoded by the first editing template and the second newly synthesized single stranded DNA encoded by the second editing template are substantially complementary or complementary to each other and can anneal to each other to form an OD. In some embodiments, the IND is excised, and the OD is incorporated in the double stranded target DNA at the place of the IND excision. As a result, the portion in the IND that is not complementary or identical to the first editing template or the second editing template is deleted from the double stranded target DNA. In some embodiments, the deletion is at the 3′ end of the IND. In some embodiments, the deletion is at the 5′ end of the IND. In some embodiments, the deletion is in the middle of the IND.

[0396] In some embodiments, the first editing template of the first PEgRNA is at least partially complementary, substantially complementary, at least partially identical, or identical to a sequence of the double stranded target DNA outside the IND. “Outside the IND” refers to sequences or positions of the double stranded target DNA that are not in between the two nick sites generated by the first prime editor and the second prime editor. In some embodiments, the first editing template comprises a region of identity to a sequence outside the IND on the second PAM strand (or the first strand) of the double stranded target DNA. In some embodiments, the first editing template comprises a region of identity to a sequence on the first strand of the double stranded target DNA adjacent to the second nick site generated by the second prime editor complexed with the second PEgRNA, wherein the sequence is outside the IND. In some embodiments, the first editing template comprises a region of identity to a sequence on the first strand of the double stranded target DNA immediately adjacent to the second nick site generated by the second prime editor complexed with the second PEgRNA, wherein the sequence is outside the IND. In some embodiments, the region of identity is at least 10, at least 15, at least 20, at least 25, at least 30, at least 35, at least 40, at least 45, at least 50, at least 55, at least 60, at least 65, at least 70, or at least 75 nucleotides in length. In some embodiments, the region of identity is about 10 to 15, about 10 to 20, about 10 to 25, about 10 to 30, about 10 to 35 about 10 to 40, about 15 to 20, about 15 to 25, about 15 to 30, about 15 to 35, about 15 to 40, about 20 to 25, about 20 to 30, about 20 to 35, about 20 to 40, about 25 to 30, about 25 to 35, about 25 to 40, about 30 to 35, or about 35 to 40 nucleotides in length. In some embodiments, the region of identity is no more than 25, no more than 30, no more than 35, no more than 40, or no more than 45 nucleotides in length. In some embodiments, the first editing template comprises a region of identity to the second spacer. In some embodiments, the first editing template comprises nucleotides m to (n−3) of the second spacer, wherein n is the length of the second spacer, and m is any integer between 1 and (n−12). In some embodiments, n is an integer from 16 to 22. For example, for a 20 nucleotide second spacer, the first editing template can contain nucleotides 1-17, 2-17, 3-17, 4-17, 5-17, 6-17, 7-7, or 8-17 of the second spacer.

[0397] Accordingly, as exemplified in FIG. 4E, in some embodiments, the first newly synthesized single stranded DNA encoded by the first editing template comprises a region of complementarity to a sequence on the first strand of the double stranded target DNA adjacent or immediately adjacent to the second nick site generated by the second prime editor complexed with the second PEgRNA. In some embodiments, the first newly synthesized single stranded DNA encoded by the first editing template comprises a region of complementarity to a sequence on the first strand of the double stranded target DNA immediately adjacent to the second nick site generated by the second prime editor complexed with the second PEgRNA, wherein the sequence is outside the IND. In some embodiments, the first newly synthesized single stranded DNA anneals with the sequence on the first strand of the double stranded target DNA adjacent or immediately adjacent to the second nick site generated by the second prime editor. In some embodiments, through DNA repair, the IND is excised and deleted from the double stranded target DNA, e.g., the target gene.

[0398] In some embodiments, the second editing template of the second PEgRNA is at least partially complementary, substantially complementary, at least partially identical, or identical to a sequence of the double stranded target DNA outside the IND. In some embodiments, the second editing template of the second PEgRNA comprises a region of identity to a sequence outside the IND on the first PAM strand (or the second strand) of the double stranded target DNA. In some embodiments, the second editing template of the second PEgRNA comprises a region of identity to a sequence on the second strand of the double stranded target DNA adjacent to the first nick site generated by the first prime editor complexed with the first PEgRNA, wherein the sequence is outside the IND. In some embodiments, the second editing template of the second PEgRNA comprises a region of identity to a sequence on the second strand of the double stranded target DNA immediately adjacent to the first nick site generated by the first prime editor complexed with the first PEgRNA, wherein the sequence is outside the IND. In some embodiments, the region of identity is at least 10, at least 15, at least 20, at least 25, at least 30, at least 35, at least 40, at least 45, at least 50, at least 55, at least 60, at least 65, at least 70, or at least 75 nucleotides in length. In some embodiments, the region of identity is about 10 to 15, about 10 to 20, about 10 to 25, about 10 to 30, about 10 to 35 about 10 to 40, about 15 to 20, about 15 to 25, about 15 to 30, about 15 to 35, about 15 to 40, about 20 to 25, about 20 to 30, about 20 to 35, about 20 to 40, about 25 to 30, about 25 to 35, about 25 to 40, about 30 to 35, or about 35 to 40 nucleotides in length. In some embodiments, the region of identity is no more than 25, no more than 30, no more than 35, no more than 40, or no more than 45 nucleotides in length. In some embodiments, the second editing template comprises a region of identity to the second spacer. In some embodiments, the second editing template comprises nucleotides m to (n−3) of the first spacer, wherein n is the length of the first spacer, and m is any integer between 1 and (n−12). In some embodiments, n is an integer from 16 to 22. For example, for a 20 nucleotide first spacer, the second editing template can contain nucleotides 1-17, 2-17, 3-17, 4-17, 5-17, 6-17, 7-7, or 8-17 of the second spacer.

[0399] Accordingly, as exemplified in FIG. 4E, in some embodiments, the second newly synthesized single stranded DNA encoded by the second editing template comprises a region of complementarity to a sequence on the second strand of the double stranded target DNA adjacent or immediately adjacent to the first nick site generated by the first prime editor complexed with the first PEgRNA. In some embodiments, the second newly synthesized single stranded DNA encoded by the second editing template comprises a region of complementarity to a sequence on the second strand of the double stranded target DNA adjacent or immediately adjacent to the first nick site generated by the first prime editor complexed with the first PEgRNA, wherein the sequence is outside the IND. In some embodiments, the second newly synthesized single stranded DNA anneals with the sequence on the second strand of the double stranded target DNA adjacent or immediately adjacent to the first nick site generated by the first prime editor. In some embodiments, through DNA repair, the IND is excised and deleted from the double stranded target DNA, e.g., the target gene.

[0400] In some embodiments, the first editing template of the first PEgRNA comprises a region at least partially identical to a sequence on the first strand of the double stranded target DNA immediately adjacent to the second nick site generated by the second prime editor complexed with the second PEgRNA, wherein the sequence is outside the IND. In some embodiments, the second editing template of the second PEgRNA comprises a region at least partially identical to a sequence on the second strand of the double stranded target DNA immediately adjacent to the first nick site generated by the first prime editor complexed with the first PEgRNA, wherein the sequence is outside the IND. In some embodiments, the first editing template and the second editing template further comprise a region of complementarity or substantial complementarity to each other.

[0401] Accordingly, as exemplified in FIG. 4F, in some embodiments, the first newly synthesized single stranded DNA encoded by the first editing template comprises a region of complementarity to a sequence on the first strand of the double stranded target DNA, wherein the sequence is immediately adjacent to the second nick site generated by the second prime editor complexed with the second PEgRNA and is outside the IND. In some embodiments, the second newly synthesized single stranded DNA encoded by the second editing template comprises a region of complementarity or substantial complementarity to a sequence on the second strand of the double stranded target DNA, wherein the sequence is immediately adjacent to the first nick site generated by the first prime editor complexed with the first PEgRNA and is outside the IND. In some embodiments, the first newly synthesized single stranded DNA encoded by the first editing template and the second newly synthesized single stranded DNA encoded by the second editing template further comprise a region of complementarity or substantial complementarity to each other, and can anneal to each other to form an OD.

[0402] In some embodiments, the first newly synthesized single stranded DNA encoded by the first editing template further comprises a region that is not complementary to the second newly synthesized single stranded DNA encoded by the second editing template and does not have complementarity or identity to the double stranded target DNA. In some embodiments, the second newly synthesized single stranded DNA encoded by the second editing template further comprises a region that is not complementary to the first newly synthesized single stranded DNA encoded by the first editing template and does not have complementarity or identity to the double stranded target DNA, e.g., the target gene.

[0403] Accordingly, in some embodiments, the RD comprises (i) the OD, (ii) the region of the first newly synthesized single stranded DNA that is not complementary to the second newly synthesized single stranded DNA and does not have complementarity or identity to the double stranded target DNA, and a complementary sequence thereof, and (iii) the region of the second newly synthesized single stranded DNA that is not complementary to the first newly synthesized single stranded DNA and does not have complementarity or identity to the double stranded target DNA, and a complementary sequence thereof. In some embodiments, through DNA repair, the IND is excised from the double stranded target DNA, e.g., the DMPK gene, and the RD is incorporated into the double stranded target DNA.

[0404] In some embodiments, the IND is excised and deleted from the target gene, and the RD is incorporated at the place of excision of the IND. In some embodiments, the IND is excised and deleted from the target gene, and the OD is incorporated at the place of excision of the IND. In some embodiments, the RD comprises a region of identity to an endogenous sequence of the double stranded target DNA. In some embodiments, the OD comprises a region of identity to an endogenous sequence of the double stranded target DNA. In some embodiments, the RD does not have sequence identity to an endogenous sequence of the double stranded target DNA. In some embodiments, the RD is exogenous to the double stranded target DNA, e.g., the target gene. In some embodiments, the RD has a biological function or encodes a polypeptide having a biological function. In some embodiments, the OD does not have sequence identity to an endogenous sequence of the double stranded target DNA. In some embodiments, the OD is exogenous to the double stranded target DNA, e.g., the target gene. In some embodiments, the OD has a biological function or encodes a polypeptide having a biological function.

[0405] In some embodiments, the first editing template of the first PEgRNA comprises a region at least partially identical to a sequence of the double stranded target DNA that is outside the IND and is not immediately adjacent to (also referred to as “distal to”) the second nick site on the second PAM strand of the double stranded target DNA. In some embodiments, the first editing template of the first PEgRNA comprises a region of identity to a sequence of double stranded target DNA on the second PAM strand that is outside the IND and is at least 1, 2, 3, 4, 5, 6, 7, 8, 9, 10, 11, 12, 13, 14, 15, 16, 17, 18, 19, 20 or more nucleotides upstream of the second nick site.

[0406] In some embodiments, the second editing template of the second PEgRNA comprises a region at least partially identical to a sequence of the double stranded target DNA that is outside the IND and is not immediately adjacent to the first nick site on the first PAM strand of the double stranded target DNA. In some embodiments, the second editing template of the second PEgRNA comprises a region of identity to a sequence of the double stranded target DNA on the first PAM strand that is outside the IND and is at least 1, 2, 3, 4, 5, 6, 7, 8, 9, 10, 11, 12, 13, 14, 15, 16, 17, 18, 19, 20 or more nucleotides upstream of the first nick site.

[0407] Accordingly, in some embodiments, the first newly synthesized single stranded DNA encoded by the first editing template comprises a region of complementarity to a sequence of the double stranded target DNA that is outside the IND and is not immediately adjacent (i.e., distal) to the second nick site on the second PAM strand. In some embodiments, the first newly synthesized DNA encoded by the first editing template can anneal with the sequence that is outside the IND and is not immediately adjacent to the second nick site on the second PAM strand of the double stranded target DNA. In some embodiments, the first newly synthesized DNA encoded by the first editing template comprises a region of complementarity to, and can anneal with a sequence of the double stranded target DNA that is outside the IND and is at least 1, 2, 3, 4, 5, 6, 7, 8, 9, 10, 11, 12, 13, 14, 15, 16, 17, 18, 19, 20 or more nucleotides upstream of the second nick site.

[0408] In some embodiments, the second newly synthesized single stranded DNA encoded by the second editing template comprises a region of complementarity to a sequence of the first PAM strand of the double stranded target DNA that is outside the IND and is not immediately adjacent to (also referred to as “distal to”) the first nick site on the first PAM strand. In some embodiments, the second newly synthesized DNA encoded by the second editing template can anneal with the sequence that is outside the IND and is not immediately adjacent to the first nick site on the first PAM strand of the double stranded target DNA. In some embodiments, the second newly synthesized DNA encoded by the second editing template comprises a region of complementarity to, and can anneal with a sequence of the double stranded target DNA that is outside the IND and is at least 1, 2, 3, 4, 5, 6, 7, 8, 9, 10, 11, 12, 13, 14, 15, 16, 17, 18, 19, 20 or more nucleotides upstream of the first nick site.

[0409] In some embodiments, through DNA repair, the IND is excised and deleted from the double stranded target DNA, e.g., the target gene. In some embodiments, the endogenous sequence of the double stranded target DNA between the 3′ end of the sequence that is outside the IND and is distal to the second nick site on the second PAM strand and the 3′ end of the sequence of the double stranded target DNA that is outside the IND and is distal to the first nick site on the first PAM strand of the double stranded target DNA is excised and deleted from the double stranded target DNA.

[0410] In some embodiments, as exemplified in FIG. 4G, the first protospacer is downstream of the second search target sequence. In some embodiments, the first editing template comprises a region that has complementarity or substantial complementarity to the second editing template, and optionally further comprises a region that does not have a complementarity to the second editing template. In some embodiments, the second editing template comprises a region that has complementarity or substantial complementarity to the first editing template, and optionally further comprises a region that does not have complementarity to the first editing template.

### Prime Editor

[0411] The term “prime editor (PE)” refers to the polypeptide or polypeptide components involved in prime editing, or any polynucleotide(s) encoding the polypeptide or polypeptide components. In various embodiments, a prime editor includes a polypeptide domain having DNA binding activity and a polypeptide domain having DNA polymerase activity. In some embodiments, the polypeptide domain having DNA binding activity is a polypeptide domain having programmable DNA binding activity. In some embodiments, the prime editor further comprises a polypeptide domain having nuclease activity. In some embodiments, the polypeptide domain having DNA binding activity comprises a nuclease domain or nuclease activity. In some embodiments, the polypeptide domain having nuclease activity comprises a nickase, or a fully active nuclease. As used herein, the term “nickase” refers to a nuclease capable of cleaving only one strand of a double-stranded DNA target. In some embodiments, the prime editor comprises a polypeptide domain that is an inactive nuclease. In some embodiments, the polypeptide domain having programmable DNA binding activity comprises a nucleic acid guided DNA binding domain, for example, a CRISPR-Cas protein, for example, a Cas9 nickase, a Cpf1 nickase, or another CRISPR-Cas nuclease. In some embodiments, the polypeptide domain having DNA polymerase activity comprises a template-dependent DNA polymerase, for example, a DNA-dependent DNA polymerase or an RNA-dependent DNA polymerase. In some embodiments, the DNA polymerase is a reverse transcriptase. In some embodiments, the prime editor comprises additional polypeptides or polypeptide domains involved in prime editing, for example, a polypeptide domain having 5′ endonuclease activity, e.g., a 5′ endogenous DNA flap endonucleases (e.g., FEN1), for helping to drive the prime editing process towards the edited product formation. In some embodiments, the prime editor further comprises an RNA-protein recruitment polypeptide, for example, a MS2 coat protein.

[0412] A prime editor may be engineered. In some embodiments, the polypeptide components of a prime editor do not naturally occur in the same organism or cellular environment. In some embodiments, the polypeptide components of a prime editor may be of different origins or from different organisms. In some embodiments, a prime editor comprises a DNA binding domain and a DNA polymerase domain that are derived from different species. In some embodiments, a prime editor comprises a Cas polypeptide and a reverse transcriptase polypeptide that are derived from different species. For example, a prime editor may comprise a S. pyogenes Cas9 polypeptide and a Moloney murine leukemia virus (M-MLV) reverse transcriptase polypeptide.

[0413] In some embodiments, polypeptide domains of a prime editor may be fused or linked by a peptide linker to form a fusion protein. In other embodiments, a prime editor comprises one or more polypeptide domains provided in trans as separate proteins, which are capable of being associated to each other through non-peptide linkages or through aptamers or recruitment sequences. For example, a prime editor may comprise a DNA binding domain and a reverse transcriptase domain associated with each other by an RNA-protein recruitment aptamer, e.g., a MS2 aptamer, which may be linked to a PEgRNA. Prime editor polypeptide components may be encoded by one or more polynucleotides in whole or in part. In some embodiments, a single polynucleotide, construct, or vector encodes the prime editor fusion protein. In some embodiments, multiple polynucleotides, constructs, or vectors each encode a polypeptide domain or portion of a domain of a prime editor, or a portion of a prime editor fusion protein. For example, a prime editor fusion protein may comprise an N-terminal portion fused to an intein-N and a C-terminal portion fused to an intein-C, each of which is individually encoded by an AAV vector.

[0414] The term “prime editor complex” is used interchangeably with the term “prime editing complex” and refers to a complex comprising one or more prime editor components (e.g., a polypeptide domain having DNA binding activity and a polypeptide domain having DNA polymerase activity) complexed with a PEgRNA.

### Prime Editor Nucleotide Polymerase Domain

[0415] In some embodiments, a prime editor comprises a nucleotide polymerase domain, e.g., a DNA polymerase domain. The DNA polymerase domain may be a wild-type DNA polymerase domain, a full-length DNA polymerase protein domain, or may be a functional mutant, a functional variant, or a functional fragment thereof. In some embodiments, the polymerase domain is a template dependent polymerase domain. For example, the DNA polymerase may rely on a template polynucleotide strand, e.g., the editing template sequence, for new strand DNA synthesis. In some embodiments, the prime editor comprises a DNA-dependent DNA polymerase. For example, a prime editor having a DNA-dependent DNA polymerase can synthesize a new single stranded DNA using a PEgRNA editing template that comprises a DNA sequence as a template. In such cases, the PEgRNA is a chimeric or hybrid PEgRNA, and comprises an extension arm comprising a DNA strand. As used herein, an “extension arm” is a polynucleotide portion of a PEgRNA that comprises an editing template and a primer binding site sequence (PBS). In some embodiments, an extension arm further comprises additional components, for example, a 3′ modifier. The chimeric or hybrid PEgRNA may comprise an RNA portion (including the spacer and the gRNA core) and a DNA portion (the extension arm comprising the editing template that includes a strand of DNA).

[0416] The DNA polymerases can be wild type polymerases from eukaryotic, prokaryotic, archael, or viral organisms, and/or the polymerases may be modified by genetic engineering, mutagenesis, or directed evolution-based processes. The polymerases can be a T7 DNA polymerase, T5 DNA polymerase, T4 DNA polymerase, Klenow fragment DNA polymerase, DNA polymerase III and the like. The polymerases can be thermostable, and can include Taq, Tne, Tma, Pfu, Tfl, Tth, Stoffel fragment, VENT® and DEEPVENT® DNA polymerases, KOD, Tgo, JDF3, and mutants, variants and derivatives thereof.

[0417] In some embodiments, the DNA polymerase is a bacteriophage polymerase, for example, a T4, T7, or phi29 DNA polymerase. In some embodiments, the DNA polymerase is an archaeal polymerase, for example, pol I type archaeal polymerase or a pol II type archaeal polymerase. In some embodiments, the DNA polymerase comprises a thermostable archaeal DNA polymerase. In some embodiments, the DNA polymerase comprises a eubacterial DNA polymerase, for example, Pol I, Pol II, or Pol III polymerase. In some embodiments, the DNA polymerase is a Pol I family DNA polymerase. In some embodiments, the DNA polymerase is a E. coli Pol I DNA polymerase. In some embodiments, the DNA polymerase is a Pol II family DNA polymerase. In some embodiments, the DNA polymerase is a Pyrococcus furiosus (Pfu) Pol II DNA polymerase. In some embodiments, the DNA Polymerase is a Pol IV family DNA polymerase. In some embodiments, the DNA polymerase is a E. coli Pol IV DNA polymerase.

[0418] In some embodiments, the DNA polymerase comprises a eukaryotic DNA polymerase. In some embodiments, the DNA polymerase is a Pol-beta DNA polymerase, a Pol-lambda DNA polymerase, a Pol-sigma DNA polymerase, or a Pol-mu DNA polymerase. In some embodiments, the DNA polymerase is a Pol-alpha DNA polymerase. In some embodiments, the DNA polymerase is a POLA1 DNA polymerase. In some embodiments, the DNA polymerase is a POLA2 DNA polymerase. In some embodiments, the DNA polymerase is a Pol-delta DNA polymerase. In some embodiments, the DNA polymerase is a POLD1 DNA polymerase. In some embodiments, the DNA polymerase is a POLD2 DNA polymerase. In some embodiments, the DNA polymerase is a human POLD1 DNA polymerase. In some embodiments, the DNA polymerase is a human POLD2 DNA polymerase. In some embodiments, the DNA polymerase is a POLD3 DNA polymerase. In some embodiments, the DNA polymerase is a POLD4 DNA polymerase. In some embodiments, the DNA polymerase is a Pol-epsilon DNA polymerase. In some embodiments, the DNA polymerase is a POLE1 DNA polymerase. In some embodiments, the DNA polymerase is a POLE2 DNA polymerase. In some embodiments, the DNA polymerase is a POLE3 DNA polymerase. In some embodiments, the DNA polymerase is a Pol-eta (POLH) DNA polymerase. In some embodiments, the DNA polymerase is a Pol-iota (POLI) DNA polymerase. In some embodiments, the DNA polymerase is a Pol-kappa (POLK) DNA polymerase. In some embodiments, the DNA polymerase is a Rev1 DNA polymerase. In some embodiments, the DNA polymerase is a human Rev1 DNA polymerase. In some embodiments, the DNA polymerase is a viral DNA-dependent DNA polymerase. In some embodiments, the DNA polymerase is a B family DNA polymerases. In some embodiments, the DNA polymerase is a herpes simplex virus (HSV) UL30 DNA polymerase. In some embodiments, the DNA polymerase is a cytomegalovirus (CMV) UL54 DNA polymerase.

[0419] In some embodiments, the DNA polymerase is an archaeal polymerase. In some embodiments, the DNA polymerase is a Family B/pol I type DNA polymerase. For example, in some embodiments, the DNA polymerase is a homolog of Pfu from Pyrococcus furiosus. In some embodiments, the DNA polymerase is a pol II type DNA polymerase. For example, in some embodiments, the DNA polymerase is a homolog of P. furiosus DP1/DP2 2-subunit polymerase. In some embodiments, the DNA polymerase lacks 5′ to 3′ nuclease activity. Suitable DNA polymerases (pol I or pol II) can be derived from archaea with optimal growth temperatures that are similar to the desired assay temperatures.

[0420] In some embodiments, the DNA polymerase comprises a thermostable archaeal DNA polymerase. In some embodiments, the thermostable DNA polymerase is isolated or derived from Pyrococcus species (furiosus, species GB-D, woesii, abysii, horikoshii), Thermococcus species (kodakaraensis KOD1, litoralis, species 9 degrees North-7, species JDF-3, gorgonarius), Pyrodictium occultum, and Archaeoglobus fulgidus.

[0421] Polymerases may also be from eubacterial species. In some embodiments, the DNA polymerase is a Pol I family DNA polymerase. In some embodiments, the DNA polymerase is an E. coli Pol I DNA polymerase. In some embodiments, the DNA polymerase is a Pol II family DNA polymerase. In some embodiments, the DNA polymerase is a Pyrococcus furiosus (Pfu) Pol II DNA polymerase. In some embodiments, the DNA Polymerase is a Pol III family DNA polymerase. In some embodiments, the DNA Polymerase is a Pol IV family DNA polymerase. In some embodiments, the DNA polymerase is an E. coli Pol IV DNA polymerase. In some embodiments, the Pol I DNA polymerase is a DNA polymerase functional variant that lacks or has reduced 5′ to 3′ exonuclease activity.

[0422] Suitable thermostable pol I DNA polymerases can be isolated from a variety of thermophilic eubacteria, including Thermus species and Thermotoga maritima such as Thermus aquaticus (Taq), Thermus thermophilus (Tth) and Thermotoga maritima (Tma UlTma).

[0423] In some embodiments, a prime editor comprises an RNA-dependent DNA polymerase domain, for example, a reverse transcriptase (RT). A RT or an RT domain may be a wild type RT domain, a full-length RT domain, or may be a functional mutant, a functional variant, or a functional fragment thereof. An RT or an RT domain of a prime editor may comprise a wild-type RT, or may be engineered or evolved to contain specific amino acid substitutions, truncations, or variants. An engineered RT may comprise sequences or amino acid changes different from a naturally occurring RT. In some embodiments, the engineered RT may have improved reverse transcription activity over a naturally occurring RT or RT domain. In some embodiments, the engineered RT may have improved features over a naturally occurring RT, for example, improved thermostability, reverse transcription efficiency, or target fidelity. In some embodiments, a prime editor comprising the engineered RT has improved prime editing efficiency over a prime editor having a reference naturally occurring RT.

[0424] In some embodiments, a prime editor comprises a virus RT, for example, a retrovirus RT. Non-limiting examples of virus RT include Moloney murine leukemia virus (M-MLV or MLVRT); human T-cell leukemia virus type 1 (HTLV-1) RT; bovine leukemia virus (BLV) RT; Rous Sarcoma Virus (RSV) RT; human immunodeficiency virus (HIV) RT, M-MFV RT, Avian Sarcoma-Leukosis Virus (ASLV) RT, Rous Sarcoma Virus (RSV) RT, Avian Myeloblastosis Virus (AMV) RT, Avian Erythroblastosis Virus (AEV) Helper Virus MCAV RT, Avian Myelocytomatosis Virus MC29 Helper Virus MCAV RT, Avian Reticuloendotheliosis Virus (REV-T) Helper Virus REV-A RT, Avian Sarcoma Virus UR2 Helper Virus (UR2AV) RT, Avian Sarcoma Virus Y73 Helper Virus YAV RT, Rous Associated Virus (RAV) RT, and Myeloblastosis Associated Virus (MAV) RT, all of which may be suitably used in the methods and composition described herein.

[0425] In some embodiments, the prime editor comprises a wild type M-MLV RT. An exemplary sequence of a reference M-MLV RT is provided in SEQ ID NO: 3578.

[0426] In some embodiments, the prime editor comprises a M-MLV RT comprising one or more of amino acid substitutions P51X, S67X, E69X, L139X, T197X, D200X, H204X, F209X, E302X, T306X, F309X, W313X, T330X, L345X, L435X, N454X, D524X, E562X, D583X, H594X, L603X, E607X, or D653X as compared to the reference M-MLV RT as set forth in SEQ ID NO: 3578, where X is any amino acid other than the wild type amino acid. In some embodiments, the prime editor comprises a M-MLV RT comprising one or more of amino acid substitutions P51L, S67K, E69K, L139P, T197A, D200N, H204R, F209N, E302K, E302R, T306K, F309N, W313F, T330P, L345G, L435G, N454K, D524G, E562Q, D583N, H594Q, L603W, E607K, and D653N as compared to the reference M-MLV RT as set forth in SEQ ID NO: 3578. In some embodiments, the prime editor comprises a M-MLV RT comprising one or more amino acid substitutions D200N, T330P, L603W, T306K, and W313F as compared to the reference M-MLV RT as set forth in SEQ ID NO: 3578. In some embodiments, the prime editor comprises a M-MLV RT comprising amino acid substitutions D200N, T330P, L603W, T306K, and W313F as compared to the reference M-MLV RT as set forth in SEQ ID NO: 3578. In some embodiments, a prime editor comprises a M-MLV RT variant having the sequence as set forth in SEQ ID NO: 3579.

[0427] In some embodiments, an RT variant may be a functional fragment of a reference RT that has 1, 2, 3, 4, 5, 6, 7, 8, 9, 10, 11, 12, 13, 14, 15, 16, 17, 18, 19, 20, 21, 22, 21, 24, 25, 26, 27, 28, 29, 30, 31, 32, 33, 34, 35, 36, 37, 38, 39, 40, 41, 42, 43, 44, 45, 46, 47, 48, 49, 50, or up to 100, or up to 200, or up to 300, or up to 400, or up to 500 or more amino acid changes compared to a reference RT, e.g., a wild type RT or a reference RT. In some embodiments, the RT variant comprises a fragment of a reference RT, e.g., a wild type RT or a reference RT, such that the fragment is about 70% identical, about 80% identical, about 90% identical, about 95% identical, about 96% identical, about 97% identical, about 98% identical, about 99% identical, about 99.5% identical, or about 99.9% identical to the corresponding fragment of the reference RT. In some embodiments, the fragment is 30%, 35%, 40%, 45%, 50%, 55%, 60%, 65%, 70%, 75%, 80%, 85%, 90%, 95%, 96%, 97%, 98%, 99%, or 99.5% of the amino acid length of a corresponding reference RT (M-MLV reverse transcriptase) (e.g., SEQ ID NO: 3578).

[0428] In some embodiments, the RT functional fragment is at least 100 amino acids in length. In some embodiments, the fragment is at least 100, 150, 200, 250, 300, 350, 400, 450, 500, 550, or up to 600 or more amino acids in length.

[0429] In still other embodiments, the functional RT variant is truncated at the N-terminus or the C-terminus, or both, by a certain number of amino acids which results in a truncated variant which still retains sufficient DNA polymerase function. In some embodiments, the RT truncated variant has a truncation of at least 1, at least 2, at least 3, at least 4, at least 5, at least 6, at least 7, at least 8, at least 9, at least 10, at least 11, at least 12, at least 13, at least 14, at least 15, at least 16, at least 17, at least 18, at least 19, at least 20, at least 21, at least 22, at least 23, at least 24, at least 25, at least 30, 40, 50, 60, 70, 80, 90, 100, 110, 120, 130, 140, 150, 160, 170, 180, 190, 200, 210, 220, 230, 240, or 250 amino acids at the N-terminal end compared to a reference RT. In some embodiments, the reference RT is has the sequence as set forth in SEQ ID NO: 3578. In other embodiments, the RT truncated variant has a truncation of at least 1, at least 2, at least 3, at least 4, at least 5, at least 6, at least 7, at least 8, at least 9, at least 10, at least 11, at least 12, at least 13, at least 14, at least 15, at least 16, at least 17, at least 18, at least 19, at least 20, at least 21, at least 22, at least 23, at least 24, at least 25, at least 30, 40, 50, 60, 70, 80, 90, 100, 110, 120, 130, 140, 150, 160, 170, 180, 190, 200, 210, 220, 230, 240, or 250 amino acids at the C-terminal end compared to a reference RT. In some embodiments, the reference RT is has the sequence as set forth in SEQ ID NO: 3578. In still other embodiments, the RT truncated variant has a truncation at the N-terminal and the C-terminal end compared to a reference RT. In some embodiments, the reference RT is has the sequence as set forth in SEQ ID NO: 3578. In some embodiments, the N-terminal truncation and the C-terminal truncation are of the same length. In some embodiments, the N-terminal truncation and the C-terminal truncation are of different lengths.

For example, the prime editors disclosed herein may include a functional variant of a wild type M-MLV reverse transcriptase. In some embodiments, the prime editor comprises a functional variant of a reference M-MLV RT, wherein the functional variant of M-MLV RT is truncated after amino acid position 502 compared to a reference M-MLV RT as set forth in SEQ ID NO: 3578. In some embodiments, the functional variant of M-MLV RT further comprises a D200X, T306X, W313X, and/or T330X amino acid substitution compared to a reference M-MLV RT as set forth in SEQ ID NO: 3578, wherein X is any amino acid other than the original amino acid. In some embodiments, the functional variant of M-MLV RT further comprises a D200N, T306K, W313F, and/or T330P amino acid substitution compared to a reference M-MLV RT as set forth in SEQ ID NO: 3578, wherein X is any amino acid other than the original amino acid. A DNA sequence encoding a prime editor comprising this truncated RT is 522 bp smaller than the DNA encoding the reference M-MLV RT (e.g. the RT as set forth in SEQ ID NO: 3578), and therefore makes it potentially useful for applications where delivery of the DNA sequence is challenging due to its size (i.e., adeno-associated virus and lentivirus delivery).

[0430] In some embodiments, a prime editor comprises a eukaryotic RT, for example, a yeast, drosophila, rodent, or primate RT. In some embodiments, the prime editor comprises a Group II intron RT, for example, a. Geobacillus stearothermophilus Group II Intron (GsI-IIC) RT or a Eubacterium rectale group II intron (Eu.re.I2) RT. In some embodiments, the prime editor comprises a retron RT.

### Programmable DNA Binding Domain

[0431] In some embodiments, the DNA-binding domain of a prime editor is a programmable DNA binding domain. A programmable DNA binding domain refers to a protein domain that is designed to bind a specific nucleic acid sequence, e.g., a target DNA or a target RNA. In some embodiments, the DNA-binding domain is a polynucleotide programmable DNA-binding domain that can associate with a guide polynucleotide (e.g., a PEgRNA) that guides the DNA-binding domain to a specific DNA sequence, e.g., a search target sequence in a target gene. In some embodiments, the DNA-binding domain comprises a Clustered Regularly Interspaced Short Palindromic Repeats (CRISPR) Associated (Cas) protein. A Cas protein may comprise any Cas protein described herein or a functional fragment or functional variant thereof. In some embodiments, a DNA-binding domain may also comprise a zinc-finger protein domain. In other cases, a DNA-binding domain comprises a transcription activator-like effector domain (TALE). In some embodiments, the DNA-binding domain comprises a DNA nuclease. For example, the DNA-binding domain of a prime editor may comprise an RNA-guided DNA endonuclease, e.g., a Cas protein. In some embodiments, the DNA-binding domain comprises a zinc finger nuclease (ZFN) or a transcription activator like effector domain nuclease (TALEN), where one or more zinc finger motifs or TALE motifs are associated with one or more nucleases, e.g., a Fok I nuclease domain.

[0432] In some embodiments, the DNA-binding domain comprise a nuclease activity. In some embodiments, the DNA-binding domain of a prime editor comprises an endonuclease domain having single strand DNA cleavage activity. For example, the endonuclease domain may comprise a FokI nuclease domain. In some embodiments, the DNA-binding domain of a prime editor comprises a nuclease having full nuclease activity. In some embodiments, the DNA-binding domain of a prime editor comprises a nuclease having modified or reduced nuclease activity as compared to a wild type endonuclease domain. For example, the endonuclease domain may comprise one or more amino acid substitutions as compared to a wild type endonuclease domain. In some embodiments, the DNA-binding domain of a prime editor has nickase activity. In some embodiments, the DNA-binding domain of a prime editor comprises a Cas protein domain that is a nickase. In some embodiments, compared to a wild type Cas protein, the Cas nickase comprises one or more amino acid substitutions in a nuclease domain that reduces or abolishes its double strand nuclease activity but retains DNA binding activity. In some embodiments, the Cas nickase comprises an amino acid substitution in a HNH domain. In some embodiments, the Cas nickase comprises an amino acid substitution in a RuvC domain.

[0433] In some embodiments, the DNA-binding domain comprises a CRISPR associated protein (Cas protein) domain. A Cas protein may be a Class 1 or a Class 2 Cas protein. A Cas protein can be a type I, type II, type III, type IV, type V Cas protein, or a type VI Cas protein. Non-limiting examples of Cas proteins include Cas9, Cas12a (Cpf1), Cas12e (CasX), Cas12d (CasY), Cas12b1 (C2c1), Cas12b2, Cas12c (C2c3), C2c4, C2c8, C2c5, C2c10, C2c9, Cas14a, Cas14b, Cas14c, Cas14d, Cas14e, Cas14f, Cas14g, Cas14h, Cas14u, Cns2, Cas Φ, and homologs, functional fragments, or modified versions thereof. A Cas protein can be a chimeric Cas protein that is fused to other proteins or polypeptides. A Cas protein can be a chimera of various Cas proteins, for example, comprising domains of Cas proteins from different organisms.

[0434] A Cas protein, e.g., Cas9, can be from any suitable organism. In some aspects, the organism is Streptococcus pyogenes (S. pyogenes). In some aspects, the organism is Staphylococcus aureus (S. aureus). In some aspects, the organism is Streptococcus thermophilus (S. thermophilus). In some embodiments, the organism is Staphylococcus lugdunensis.

[0435] A Cas protein, e.g., Cas9, can be a wild type or a modified form of a Cas protein. A Cas protein, e.g., Cas9, can be a nuclease active variant, nuclease inactive variant, a nickase, or a functional variant or functional fragment of a wild type Cas protein. A Cas protein, e.g., Cas9, can comprise an amino acid change such as a deletion, insertion, substitution, fusion, chimera, or any combination thereof relative to a wild-type version of the Cas protein. A Cas protein can be a polypeptide with at least about 50%, 60%, 70%, 80%, 90%, 91%, 92%, 93%, 94%, 95%, 96%, 97%, 98%, 99%, or 100% sequence identity or sequence similarity to a wild type exemplary Cas protein.

[0436] A Cas protein, e.g., Cas9, may comprise one or more domains. Non-limiting examples of Cas domains include, guide nucleic acid recognition and/or binding domain, nuclease domains (e.g., DNase or RNase domains, RuvC, HNH), DNA binding domain, RNA binding domain, helicase domains, protein-protein interaction domains, and dimerization domains. In various embodiments, a Cas protein comprises a guide nucleic acid recognition and/or binding domain that can interact with a guide nucleic acid, and one or more nuclease domains that comprise catalytic activity for nucleic acid cleavage.

[0437] In some embodiments, a Cas protein, e.g., Cas9, comprises one or more nuclease domains. A Cas protein can comprise an amino acid sequence having at least about 50%, 60%, 70%, 80%, 90%, 91%, 92%, 93%, 94%, 95%, 96%, 97%, 98%, 99%, or 100% sequence identity to a nuclease domain (e.g., RuvC domain, HNH domain) of a wild-type Cas protein. In some embodiments, a Cas protein comprises a single nuclease domain. For example, a Cpf1 may comprise a RuvC domain but lacks HNH domain. In some embodiments, a Cas protein comprises two nuclease domains, e.g., a Cas9 protein can comprise an HNH nuclease domain and a RuvC nuclease domain.

[0438] In some embodiments, a prime editor comprises a Cas protein, e.g., Cas9, wherein all nuclease domains of the Cas protein are active. In some embodiments, a prime editor comprises a Cas protein having one or more inactive nuclease domains. One or a plurality of the nuclease domains (e.g., RuvC, HNH) of a Cas protein can be deleted or mutated so that they are no longer functional or comprise reduced nuclease activity. In some embodiments, a Cas protein, e.g., Cas9, comprising mutations in a nuclease domain has reduced (e.g., nickase) or abolished nuclease activity while maintaining its ability to target a nucleic acid locus at a search target sequence when complexed with a guide nucleic acid, e.g., a PEgRNA.

[0439] In some embodiments, a prime editor comprises a Cas nickase that can bind to the target gene in a sequence-specific manner and generate a single-strand break at a protospacer within double-stranded DNA in the target gene, but not a double-strand break. For example, the Cas nickase can cleave the edit strand (i.e., the PAM strand) or the non-edit strand of the target gene, but may not cleave both. In some embodiments, a prime editor comprises a Cas nickase comprising two nuclease domains (e.g., Cas9), with one of the two nuclease domains modified to lack catalytic activity or deleted. In some embodiments, the Cas nickase of a prime editor comprises a nuclease inactive RuvC domain and a nuclease active HNH domain. In some embodiments, the Cas nickase of a prime editor comprises a nuclease inactive HNH domain and a nuclease active RuvC domain. In some embodiments, a prime editor comprises a Cas9 nickase having an amino acid substitution in the RuvC domain. In some embodiments, the Cas9 nickase comprises a DIOX amino acid substitution compared to a wild type S. pyogenes Cas9 as set forth in SEQ ID NO: 3580, wherein X is any amino acid other than D. In some embodiments, a prime editor comprises a Cas9 nickase having an amino acid substitution in the HNH domain. In some embodiments, the Cas9 nickase comprises a H840X amino acid substitution compared to a wild type S. pyogenes Cas9 as set forth in SEQ ID NO: 3580, wherein X is any amino acid other than H.

[0440] In some embodiments, a prime editor comprises a Cas protein that can bind to the target gene in a sequence-specific manner but lacks or has abolished nuclease activity and may not cleave either strand of a double stranded DNA in a target gene. Abolished activity or lacking activity can refer to an enzymatic activity less than 1%, less than 2%, less than 3%, less than 4%, less than 5%, less than 6%, less than 7%, less than 8%, less than 9%, or less than 10% activity compared to a wild-type exemplary activity (e.g., wild-type Cas9 nuclease activity). In some embodiments, a Cas protein of a prime editor completely lacks nuclease activity. A nuclease, e.g., Cas9, that lacks nuclease activity may be referred to as nuclease inactive or “nuclease dead” (abbreviated by “d”). A nuclease dead Cas protein (e.g., dCas, dCas9) can bind to a target polynucleotide but may not cleave the target polynucleotide. In some aspects, a dead Cas protein is a dead Cas9 protein. In some embodiments, a prime editor comprises a nuclease dead Cas protein wherein all of the nuclease domains (e.g., both RuvC and HNH nuclease domains in a Cas9 protein; RuvC nuclease domain in a Cpf1 protein) are mutated to lack catalytic activity, or are deleted.

[0441] A Cas protein can be modified. A Cas protein, e.g., Cas9, can be modified to increase or decrease nucleic acid binding affinity, nucleic acid binding specificity, and/or enzymatic activity. Cas proteins can also be modified to change any other activity or property of the protein, such as stability. For example, one or more nuclease domains of the Cas protein can be modified, deleted, or inactivated, or a Cas protein can be truncated to remove domains that are not essential for the function of the protein or to optimize (e.g., enhance or reduce) the activity of the Cas protein.

[0442] A Cas protein can be a fusion protein. For example, a Cas protein can be fused to a cleavage domain, an epigenetic modification domain, a transcriptional regulation domain, or a polymerase domain. A Cas protein can also be fused to a heterologous polypeptide providing increased or decreased stability. The fused domain or heterologous polypeptide can be located at the N-terminus, the C-terminus, or internally within the Cas protein.

[0443] In some embodiments, the Cas protein of a prime editor is a Class 2 Cas protein. In some embodiments, the Cas protein is a type II Cas protein. In some embodiments, the Cas protein is a Cas9 protein, a modified version of a Cas9 protein, a Cas9 protein homolog, mutant, variant, or a functional fragment thereof. As used herein, a Cas9, Cas9 protein, Cas9 polypeptide or a Cas9 nuclease refers to an RNA guided nuclease comprising one or more Cas9 nuclease domains and a Cas9 gRNA binding domain having the ability to bind a guide polynucleotide, e.g., a PEgRNA. A Cas9 protein may refer to a wild type Cas9 protein from any organism or a homolog, ortholog, or paralog from any organisms; any functional mutants or functional variants thereof; or any functional fragments or domains thereof. In some embodiments, a prime editor comprises a full-length Cas9 protein. In some embodiments, the Cas9 protein can generally comprises at least about 50%, 60%, 70%, 80%, 90%, 100% sequence identity to a wild type reference Cas9 protein (e.g., Cas9 from S. pyogenes). In some embodiments, the Cas9 comprises an amino acid change such as a deletion, insertion, substitution, fusion, chimera, or any combination thereof as compared to a wild type reference Cas9 protein.

[0444] In some embodiments, a Cas9 protein may comprise a Cas9 protein from Streptococcus pyogenes (Sp), Staphylococcus aureus (Sa), Streptococcus canis (Sc), Streptococcus thermophilus (St), Staphylococcus lugdunensis (Slu), Neisseria meningitidis (Nm), Campylobacter jejuni (Cj), Francisella novicida (Fn), or Treponema denticola (Td), or any Cas9 homolog or ortholog from an organism known in the art. In some embodiments, a Cas9 polypeptide is a SpCas9 polypeptide. In some embodiments, a Cas9 polypeptide is a SaCas9 polypeptide. In some embodiments, a Cas9 polypeptide is a ScCas9 polypeptide. In some embodiments, a Cas9 polypeptide is a StCas9 polypeptide. In some embodiments, a Cas9 polypeptide is a SluCas9 polypeptide. In some embodiments, a Cas9 polypeptide is a NmCas9 polypeptide. In some embodiments, a Cas9 polypeptide is a CjCas9 polypeptide. In some embodiments, a Cas9 polypeptide is a FnCas9 polypeptide. In some embodiments, a Cas9 polypeptide is a TdCas9 polypeptide. In some embodiments, a Cas9 polypeptide is a chimera comprising domains from two or more of the organisms described herein or those known in the art. In some embodiments, a Cas9 polypeptide is a Cas9 polypeptide from Streptococcus macacae. In some embodiments, a Cas9 polypeptide is a Cas9 polypeptide generated by replacing a PAM interaction domain of a SpCas9 with that of a Streptococcus macacae Cas9 (Spy-mac Cas9).

[0445] In some embodiments, a Cas9 is a chimeric Cas9, e.g., modified Cas9; e.g., synthetic RNA-guided nucleases (sRGNs), e.g., modified by DNA family shuffling, e.g., sRGN3.1, sRGN3.3. In some embodiments, the DNA family shuffling comprises, fragmentation and reassembly of parental Cas9 genes, e.g., one or more of Cas9s from Staphylococcus hyicus (Shy), Staphylococcus lugdunensis (Slu), Staphylococcus microti (Smi), and Staphylococcus pasteuri (Spa).

[0446] An exemplary wild type Streptococcus pyogenes Cas9 (SpCas9) amino acid sequence is provided in SEQ ID NO: 3580.

[0447] In some embodiments, a prime editor comprises a Cas9 protein from Staphylococcus lugdunensis (Slu Cas9). An exemplary amino acid sequence of a wild type Slu Cas9 is provided in SEQ ID NO: 3583.

[0448] In some embodiments, a Cas9 protein comprises a variant Cas9 protein containing one or more amino acid substitutions. In some embodiments, a wild type Cas9 protein comprises a RuvC domain and an HNH domain. In some embodiments, a prime editor comprises a nuclease active Cas9 protein that may cleave both strands of a double stranded target DNA sequence. In some embodiments, the nuclease active Cas9 protein comprises a functional RuvC domain and a functional HNH domain. In some embodiments, a prime editor comprises a Cas9 nickase that can bind to a guide polynucleotide and recognize a target DNA, but can cleave only one strand of a double stranded target DNA. In some embodiments, the Cas9 nickase comprises only one functional RuvC domain or one functional HNH domain. In some embodiments, a prime editor comprises a Cas9 that has a non-functional HNH domain and a functional RuvC domain. In some embodiments, the prime editor can cleave the edit strand (i.e., the PAM strand), but not the non-edit strand of a double stranded target DNA sequence. In some embodiments, a prime editor comprises a Cas9 having a non-functional RuvC domain that can cleave the target strand (i.e., the non-PAM strand), but not the edit strand of a double stranded target DNA sequence. In some embodiments, a prime editor comprises a Cas9 that has neither a functional RuvC domain nor a functional HNH domain, which may not cleave any strand of a double stranded target DNA sequence.

[0449] In some embodiments, a prime editor comprises a Cas9 having a mutation in the RuvC domain that reduces or abolishes the nuclease activity of the RuvC domain. In some embodiments, the Cas9 comprise a mutation at amino acid D10 as compared to a wild type SpCas9 as set forth in SEQ ID NO: 3580, or a corresponding mutation thereof. In some embodiments, the Cas9 comprise a D10A mutation as compared to a wild type SpCas9 as set forth in SEQ ID NO: 3580, or a corresponding mutation thereof. In some embodiments, the Cas9 polypeptide comprise a mutation at amino acid D10, G12, and/or G17 as compared to a wild type SpCas9 as set forth in SEQ ID NO: 3580, or a corresponding mutation thereof. In some embodiments, the Cas9 polypeptide comprise a D10A mutation, a G12A mutation, and/or a G17A mutation as compared to a wild type SpCas9 as set forth in SEQ ID NO: 3580, or a corresponding mutation thereof.

[0450] In some embodiments, a prime editor comprises a Cas9 polypeptide having a mutation in the HNH domain that reduces or abolishes the nuclease activity of the HNH domain. In some embodiments, the Cas9 polypeptide comprise a mutation at amino acid H840 as compared to a wild type SpCas9 as set forth in SEQ ID NO: 3580, or a corresponding mutation thereof. In some embodiments, the Cas9 polypeptide comprise a H840A mutation as compared to a wild type SpCas9 as set forth in SEQ ID NO: 3580, or a corresponding mutation thereof. In some embodiments, the Cas9 polypeptide comprises a mutation at amino acid E762, D839, H840, N854, N856, N863, H982, H983, A984, D986, and/or a A987 as compared to a wild type SpCas9 as set forth in SEQ ID NO: 3580, or a corresponding mutation thereof. In some embodiments, the Cas9 polypeptide comprise a E762A, D839A, H840A, N854A, N856A, N863A, H982A, H983A, A984A, and/or a D986A mutation as compared to a wild type SpCas9 as set forth in SEQ ID NO: 3580, or a corresponding mutation thereof.

[0451] In some embodiments, a prime editor comprises a Cas9 having one or more amino acid substitutions in both the HNH domain and the RuvC domain that reduce or abolish the nuclease activity of both the HNH domain and the RuvC domain. In some embodiments, the prime editor comprises a nuclease inactive Cas9, or a nuclease dead Cas9 (dCas9). In some embodiments, the dCas9 comprises a H840X substitution and a DIOX mutation compared to a wild type SpCas9 as set forth in SEQ ID NO: 3580 or corresponding mutations thereof, wherein X is any amino acid other than H for the H840X substitution and any amino acid other than D for the DIOX substitution. In some embodiments, the dead Cas9 comprises a H840A and a D10A mutation as compared to a wild type SpCas9 as set forth in SEQ ID NO: 3580, or corresponding mutations thereof.

[0452] In some embodiments, the N-terminal methionine is removed from a Cas9 nickase, or from any Cas9 variant, ortholog, or equivalent disclosed or contemplated herein. For example, methionine-minus Cas9 nickases, or a variant thereof having an amino acid sequence that has at least 80%, at least 85%, at least 90%, at least 95%, or at least 99% sequence identity thereto.

[0453] In some embodiments, a prime editor comprises a Streptococcus pyogenes Cas9 (SpCas9) having a nuclease inactivating mutation in the HNH domain (a SpCas9 nickase). In some embodiments, the SpCas9 nickase lacks the N-terminus methionine relative to a corresponding reference SpCas9 (e.g., wild type SpCas9). In some embodiments, a prime editor comprises a SpCas9 nickase having the sequences as provide in SEQ ID NO: 3581 (SpCas9 H840A nickase including the N-terminal methionine). In some embodiments, a prime editor comprises a SpCas9 nickase having the sequences as provide in SEQ ID NO: 3582 (SpCas9 H840A nickase lacking the N-terminal methionine).

[0454] In some embodiments, the SpCas9 nickase further comprises a R221K and/or a N394K amino acid substitution compared to a reference SpCas9 sequence set forth in SEQ ID NO: 3580. In some embodiments, the SpCas9 nickase comprises a sequence as set forth in SEQ ID NO: 3623.

[0455] In some embodiments, a prime editor comprises a Staphylococcus lugdunensis (SluCas9) having a nuclease inactivating mutation in the HNH domain (a SluCas9 nickase). In some embodiments, the SluCas9 nickase lacks the N-terminus methionine relative to a corresponding reference SluCas9 (e.g., wild type SluCas9). In some embodiments, a prime editor comprises a SluCas9 nickase having the sequences as provide in SEQ ID NO: 3584 (SluCas9 H840A nickase including the N-terminal methionine). In some embodiments, a prime editor comprises a SluCas9 nickase having the sequences as provide in SEQ ID NO: 3585 (SluCas9 H840A nickase lacking the N-terminal methionine).

[0456] Besides dead Cas9 and Cas9 nickase variants, the Cas9 proteins used herein may also include other Cas9 variants having at least about 70% identity, at least about 80% identity, at least about 90% identity, at least about 95% identity, at least about 96% identity, at least about 97% identity, at least about 98% identity, at least about 99% identity, at least about 99.5% identity, or at least about 99.9% identity to any reference Cas9 protein, including any wild type Cas9, or mutant Cas9 (e.g., a dead Cas9 or Cas9 nickase), or fragment Cas9, or circular permutant Cas9, or other variant of Cas9 disclosed herein or known in the art. In some embodiments, a Cas9 variant may have 1, 2, 3, 4, 5, 6, 7, 8, 9, 10, 11, 12, 13, 14, 15, 16, 17, 18, 19, 20, 21, 22, 21, 24, 25, 26, 27, 28, 29, 30, 31, 32, 33, 34, 35, 36, 37, 38, 39, 40, 41, 42, 43, 44, 45, 46, 47, 48, 49, 50 or more amino acid changes compared to a reference Cas9, e.g., a wild type Cas9. In some embodiments, the Cas9 variant comprises a fragment of a reference Cas9 (e.g., a gRNA binding domain or a DNA-cleavage domain), such that the fragment is at least about 70% identical, at least about 80% identical, at least about 90% identical, at least about 95% identical, at least about 96% identical, at least about 97% identical, at least about 98% identical, at least about 99% identical, at least about 99.5% identical, or at least about 99.9% identical to the corresponding fragment of the reference Cas9, e.g., a wild type Cas9. In some embodiments, the fragment is at least 30%, at least 35%, at least 40%, at least 45%, at least 50%, at least 55%, at least 60%, at least 65%, at least 70%, at least 75%, at least 80%, at least 85%, at least 90%, at least 95% identical, at least 96%, at least 97%, at least 98%, at least 99%, or at least 99.5% of the amino acid length of a corresponding wild type Cas9.

[0457] In some embodiments, a Cas9 fragment is a functional fragment that retains one or more Cas9 activities. In some embodiments, the Cas9 fragment is at least 100 amino acids in length. In some embodiments, the fragment is at least 100, 150, 200, 250, 300, 350, 400, 450, 500, 550, 600, 650, 700, 750, 800, 850, 900, 950, 1000, 1050, 1100, 1150, 1200, 1250, or at least 1300 amino acids in length.

[0458] In some embodiments, a prime editor comprises a Cas protein, e.g., Cas9, containing modifications that allow altered PAM recognition. In prime editing using a Cas-protein-based prime editor, a “protospacer adjacent motif (PAM)”, PAM sequence, or PAM-like motif, may be used to refer to a short DNA sequence immediately following the protospacer on the PAM strand of the target gene. In some embodiments, the PAM is recognized by the Cas nuclease in the prime editor during prime editing. In certain embodiments, the PAM is required for target binding of the Cas protein. The specific PAM sequence required for Cas protein recognition may depend on the specific type of the Cas protein. A PAM can be 1, 2, 3, 4, 5, 6, 7, 8, 9, 10 or more nucleotides in length. In some embodiments, a PAM is between 2-6 nucleotides in length. In some embodiments, the PAM can be a 5′ PAM (i.e., located upstream of the 5′ end of the protospacer). In other embodiments, the PAM can be a 3′ PAM (i.e., located downstream of the 5′ end of the protospacer). In some embodiments, the Cas protein of a prime editor recognizes a canonical PAM, for example, a SpCas9 recognizes 5′-NGG-3′ PAM. In some embodiments, the Cas protein of a prime editor has altered or non-canonical PAM specificities. Exemplary PAM sequences and corresponding Cas variants are described in Table 43 below. It should be appreciated that for each of the variants provided, the Cas protein comprises one or more of the amino acid substitutions as indicated compared to a wild type Cas protein sequence, for example, the SpCas9 as set forth in SEQ ID NO: 3580. The PAM motifs as shown in Table 43 below are in the order of 5′ to 3′. The nucleotides listed in Table 43 are represented by the base codes as provided in the Handbook on Industrial Property Information and Documentation, World Intellectual Property Organization (WIPO) Standard ST.26, Version 1.4. For example, an “R” in Table 43 represents the nucleotide A or G; “W” in Table 43 represents A or T; and “V” in Table 43 represents A or C or G.

TABLE 43
Cas protein variants and corresponding PAM sequences

| Variant | PAM |
|---|---|
| spCas9 (wild type) | NGG, NGA, NAG |
| spCas9-VRVRFRR (also referred to as SpCas9-NG) | NG |
| R1335V/L1111R/D1135V/G1218R/E1219F/A1322R/T1337R | |
| spCas9-VQR (D1135V/R1335Q/T1337R) | NGA |
| spCas9-EQR (D1135E/R1335Q/T1337R) | NGA |
| spCas9-VRER (D1135V/G1218R/R1335E/T1337R) | NGCG |
| xCas9 (E480K, E543D, E1219V, K294R, Q1256K, A262T, | NGN |
| S409I, M694I) | |
| SluCa9 | NNGG |
| saCas9 | NNGRRT, NNGRRN |
| saCas9-KKH (E782K, N968K, R1015H) | NNNRRT |
| spCas9-MQKSER (D1135M, S1136Q, G1218K, E1219S, | NGCG/NGCN |
| R1335E, T1337R) | |
| spCas9-LRKIQK (D1135L, S1136R, G1218K, E1219I, | NGTN |
| R1335Q, T1337K) | |
| spCas9-LRVSQK (D1135L, S1136R, G1218V, E1219S, | NGTN |
| R1335Q, T1337K) | |
| spCas9-LRVSQL(D1135L, S1136R, G1218V, E1219S, | NGTN |
| R1335Q, T1337L) | |
| Cpf1 | TTTV |
| Spy-Mac | NAA |
| NmCas9 | NNNNGATT |
| StCas9 | NNAGAAW |
| TdCas9 | NAAAAC |
| spCas9-VRQR (D1135V, G1218R, R1335Q, T1337R) | NGA |
| SpG Cas9 (D1135L, S1136W, G1218K, E1219Q, R1335Q, | NGN |
| T1337R) | |
| SyRY Cas9 | NRN |
| (A61R, L1111R, N1317R, A1322R, and R1333P) | |
| sRGN1, sRGN2, sRGN4, sRGN3.1, sRGN3.3 | NNGG |

[0459] Exemplary Cas9s that allow alternative PAM recognition are provided in SEQ ID NO: 3590 (SpCas9-NG), SEQ ID NO: 3591 (SpCas9-NG H840A nickase), SEQ ID NO: 3592 (SpCas9-NG H839A nickase lacking N-terminal methionine), SEQ ID NO: 3593 (SpCas9-VRQR), SEQ ID NO: 3594 (SpCas9-VRQR H840A nickase), SEQ ID NO: 3595 (SpCas9-VRQR H839A nickase lacking N-terminal methionine), SEQ ID NO: 3596 (SpRY Cas9), SEQ ID NO: 3697 (SpRY Cas9 H840A nickase), SEQ ID NO: 3598 (SpRY Cas9 H839A nickase lacking N-terminal methionine), SEQ ID NO: 3599 (sRGN3.1), SEQ ID NO: 3600 (sRGN3.1 N585A nickase), SEQ ID NO: 3601 (sRNA3.1 N584A nickase lacking N-terminal methionine), SEQ ID NO: 3602 (sRGN3.3), SEQ ID NO: 3603 (sRGN3.3 N585A nickase), SEQ ID NO: 3604 (sRGN3.3 N584A nickase lacking N-terminal methionine), SEQ ID NO: 3605 (SpG Cas9), SEQ ID NO: 3606 (SpG Cas9 H840A nikcase), and SEQ ID NO: 3607 (SpG Cas9 H839A nickase lacking N-terminal methionine). In some embodiments, a prime editor comprises a Cas9 polypeptide comprising one or more mutations selected from the group consisting of: A61R, L111R, D1135V, R221K, A262T, R324L, N394K, S409I, S409I, E427G, E480K, M495V, N497A, Y515N, K526E, F539S, E543D, R654L, R661A, R661L, R691A, N692A, M694A, M694I, Q695A, H698A, R753G, M763I, K848A, K890N, Q926A, K1003A, R1060A, L1111R, R1114G, D1135E, D1135L, D1135N, S1136W, V1139A, D1180G, G1218K, G1218R, G1218S, E1219Q, E1219V, E1219V, Q1221H, P1249S, E1253K, N1317R, A1320V, P1321S, A1322R, I1322V, D1332G, R1332N, A1332R, R1333K, R1333P, R1335L, R1335Q, R1335V, T1337N, T1337R, S1338T, H1349R, and any combinations thereof as compared to a wild type SpCas9 polypeptide as set forth in SEQ ID NO: 3580.

[0460] In some embodiments, a prime editor comprises a SaCas9 polypeptide. In some embodiments, the SaCas9 polypeptide comprises one or more of mutations E782K, N968K, and R1015H as compared to a wild type SaCas9. In some embodiments, a prime editor comprises a FnCas9 polypeptide, for example, a wild type FnCas9 polypeptide or a FnCas9 polypeptide comprising one or more of mutations E1369R, E1449H, or R1556A as compared to the wild type FnCas9. In some embodiments, a prime editor comprises a Sc Cas9, for example, a wild type ScCas9 or a ScCas9 polypeptide comprises one or more of mutations I367K, G368D, I369K, H371L, T375S, T376G, and T1227K as compared to the wild type ScCas9. In some embodiments, a prime editor comprises a St1 Cas9 polypeptide, a St3 Cas9 polypeptide, or a Slu Cas9 polypeptide.

[0461] In some embodiments, a prime editor comprises a Cas polypeptide that comprises a circular permutant Cas variant. For example, a Cas9 polypeptide of a prime editor may be engineered such that the N-terminus and the C-terminus of a Cas9 protein (e.g., a wild type Cas9 protein, or a Cas9 nickase) are topically rearranged to retain the ability to bind DNA when complexed with a guide RNA (gRNA). An exemplary circular permutant configuration may be N-terminus-[original C-terminus]-[original N-terminus]-C-terminus. Any of the Cas9 proteins described herein, including any variant, ortholog, or naturally occurring Cas9 or equivalent thereof, may be reconfigured as a circular permutant variant.

[0462] In various embodiments, the circular permutants of a Cas protein, e.g., a Cas9, may have the following structure: N-terminus-[original C-terminus]-[optional linker]-[original N-terminus]-C-terminus. In some embodiments, a circular permutant Cas9 comprises any one of the following structures (amino acid positions as set forth in SEQ ID NO: 3580.
[0463] N-terminus-[1268-1368]-[optional linker]-[1-1267]-C-terminus;
[0464] N-terminus-[1168-1368]-[optional linker]-[1-1167]-C-terminus;
[0465] N-terminus-[1068-1368]-[optional linker]-[1-1067]-C-terminus;
[0466] N-terminus-[968-1368]-[optional linker]-[1-967]-C-terminus;
[0467] N-terminus-[868-1368]-[optional linker]-[1-867]-C-terminus;
[0468] N-terminus-[768-1368]-[optional linker]-[1-767]-C-terminus;
[0469] N-terminus-[668-1368]-[optional linker]-[1-667]-C-terminus;
[0470] N-terminus-[568-1368]-[optional linker]-[1-567]-C-terminus;
[0471] N-terminus-[468-1368]-[optional linker]-[1-467]-C-terminus;
[0472] N-terminus-[368-1368]-[optional linker]-[1-367]-C-terminus;
[0473] N-terminus-[268-1368]-[optional linker]-[1-267]-C-terminus;
[0474] N-terminus-[168-1368]-[optional linker]-[1-167]-C-terminus;
[0475] N-terminus-[68-1368]-[optional linker]-[1-67]-C-terminus;
[0476] N-terminus-[10-1368]-[optional linker]-[1-9]-C-terminus, or the corresponding circular permutants of other Cas9 proteins (including other Cas9 orthologs, variants, etc).

[0477] In some embodiments, a circular permutant Cas9 comprises any one of the following structures (amino acid positions as set forth in SEQ ID NO: 3580):
[0478] N-terminus-[102-1368]-[optional linker]-[1-101]-C-terminus;
[0479] N-terminus-[1028-1368]-[optional linker]-[1-1027]-C-terminus;
[0480] N-terminus-[1041-1368]-[optional linker]-[1-1043]-C-terminus;
[0481] N-terminus-[1249-1368]-[optional linker]-[1-1248]-C-terminus; or
[0482] N-terminus-[1300-1368]-[optional linker]-[1-1299]-C-terminus, or the corresponding circular permutants of other Cas9 proteins (including other Cas9 orthologs, variants, etc).

[0483] In some embodiments, a circular permutant Cas9 comprises any one of the following structures (amino acid positions as set forth in SEQ ID NO: 3580):
[0484] N-terminus-[103-1368]-[optional linker]-[1-102]-C-terminus:
[0485] N-terminus-[1029-1368]-[optional linker]-[1-1028]-C-terminus;
[0486] N-terminus-[1042-1368]-[optional linker]-[1-1041]-C-terminus;
[0487] N-terminus-[1250-1368]-[optional linker]-[1-1249]-C-terminus; or
[0488] N-terminus-[1301-1368]-[optional linker]-[1-1300]-C-terminus, or the corresponding circular permutants of other Cas9 proteins (including other Cas9 orthologs, variants, etc).

[0489] In some embodiments, the circular permutant can be formed by linking a C-terminal fragment of a Cas9 to an N-terminal fragment of a Cas9, either directly or by using a linker, such as an amino acid linker. In some embodiments, the C-terminal fragment may correspond to the C-terminal 95% or more of the amino acids of a Cas9 (e.g., amino acids about 1300-1368 as set forth in SEQ ID NO: 3580 or corresponding amino acid positions thereof), or the C-terminal 90%, 85%, 80%, 75%, 70%, 65%, 60%, 55%, 50%, 45%, 40%, 35%, 30%, 25%, 20%, 15%, 10%, or 5% or more of a Cas9. The N-terminal portion may correspond to the N-terminal 95% or more of the amino acids of a Cas9 (e.g., amino acids about 1-1300 as set forth in SEQ ID NO: 3580 or corresponding amino acid positions thereof), or the N-terminal 90%, 85%, 80%, 75%, 70%, 65%, 60%, 55%, 50%, 45%, 40%, 35%, 30%, 25%, 20%, 15%, 10%, or 5% or more of a Cas9 (e.g., as set forth in SEQ ID NO: 3580 or corresponding amino acid positions thereof).

[0490] In some embodiments, the circular permutant can be formed by linking a C-terminal fragment of a Cas9 to an N-terminal fragment of a Cas9, either directly or by using a linker, such as an amino acid linker. In some embodiments, the C-terminal fragment that is rearranged to the N-terminus includes or corresponds to the C-terminal 30% or less of the amino acids of a Cas9 (e.g., amino acids 1012-1368 as set forth in SEQ ID NO: 3580 or corresponding amino acid positions thereof). In some embodiments, the C-terminal fragment that is rearranged to the N-terminus, includes or corresponds to the C-terminal 30%, 29%, 28%, 27%, 26%, 25%, 24%, 23%, 22%, 21%, 20%, 19%, 18%, 17%, 16%, 15%, 14%, 3%, 12%, 11%, 10%, 9%, 8%, 7%, 6%, 5%, 4%, 3%, 2%, or 1% of the amino acids of a Cas9 (e.g., as set forth in SEQ ID NO: 3580 or corresponding amino acid positions thereof). In some embodiments, the C-terminal fragment that is rearranged to the N-terminus, includes or corresponds to the C-terminal 410 residues or less of a Cas9 (e.g., as set forth in SEQ ID NO: 3580 or corresponding amino acid positions thereof). In some embodiments, the C-terminal portion that is rearranged to the N-terminus, includes or corresponds to the C-terminal 410, 400, 390, 380, 370, 360, 350, 340, 330, 320, 310, 300, 290, 280, 270, 260, 250, 240, 230, 220, 210, 200, 190, 180, 170, 160, 150, 140, 130, 120, 110, 100, 90, 80, 70, 60, 50, 40, 30, 20, or 10 residues of a Cas9 (e.g., as set forth in SEQ ID NO: 3580 or corresponding amino acid positions thereof). In some embodiments, the C-terminal portion that is rearranged to the N-terminus includes or corresponds to the C-terminal 357, 341, 328, 120, or 69 residues of a Cas9 (e.g., as set forth in SEQ ID NO: 3580 or corresponding amino acid positions thereof).

[0491] In other embodiments, circular permutant Cas9 variants may be a topological rearrangement of a Cas9 primary structure based on the following method, which is based on S. pyogenes Cas9 of SEQ ID NO: 3580: (a) selecting a circular permutant (CP) site corresponding to an internal amino acid residue of the Cas9 primary structure, which dissects the original protein into two halves: an N-terminal region and a C-terminal region; (b) modifying the Cas9 protein sequence (e.g., by genetic engineering techniques) by moving the original C-terminal region (comprising the CP site amino acid) to precede the original N-terminal region, thereby forming a new N-terminus of the Cas9 protein that now begins with the CP site amino acid residue. The CP site can be located in any domain of the Cas9 protein, including, for example, the helical-II domain, the RuvCIII domain, or the CTD domain. For example, the CP site may be located (as set forth in SEQ ID NO: 3580 or corresponding amino acid positions thereof) at original amino acid residue 181, 199, 230, 270, 310, 1010, 1016, 1023, 1029, 1041, 1247, 1249, or 1282. Thus, once relocated to the N-terminus, original amino acid 181, 199, 230, 270, 310, 1010, 1016, 1023, 1029, 1041, 1247, 1249, or 1282 would become the new N-terminal amino acid. Nomenclature of these CP-Cas9 proteins may be referred to as Cas9-CP¹⁸¹, Cas9-CP¹⁹⁹, Cas9-CP²³⁰, Cas9-CP²⁷⁰, Cas9-CP³¹⁰, Cas9-CP¹⁰¹⁰, Cas9-CP¹⁰¹⁶, Cas9-CP¹⁰²³, Cas9-CP¹⁰²⁹, Cas9-CP¹⁰⁴¹, Cas9-CP¹²⁴⁷, Cas9-CP¹²⁴⁹, and Cas9-CP¹²⁸², respectively. This description is not meant to be limited to making CP variants from SEQ ID NO: 3580, but may be implemented to make CP variants in any Cas9 sequence, either at CP sites that correspond to these positions, or at other CP sites entirely. This description is not meant to limit the specific CP sites in any way. Virtually any CP site may be used to form a CP-Cas9 variant.

[0492] In some embodiments, a prime editor comprises a Cas9 functional variant that is of smaller molecular weight than a wild type SpCas9 protein. In some embodiments, a smaller-sized Cas9 functional variant may facilitate delivery to cells, e.g., by an expression vector, nanoparticle, or other means of delivery. In certain embodiments, a smaller-sized Cas9 functional variant is a Class 2 Type II Cas protein. In certain embodiments, a smaller-sized Cas9 functional variant is a Class 2 Type V Cas protein. In certain embodiments, a smaller-sized Cas9 functional variant is a Class 2 Type VI Cas protein.

[0493] In some embodiments, a prime editor comprises a SpCas9 that is 1368 amino acids in length and has a predicted molecular weight of 158 kilodaltons. In some embodiments, a prime editor comprises a Cas9 functional variant or functional fragment that is less than 1300 amino acids, less than 1290 amino acids, than less than 1280 amino acids, less than 1270 amino acids, less than 1260 amino acid, less than 1250 amino acids, less than 1240 amino acids, less than 1230 amino acids, less than 1220 amino acids, less than 1210 amino acids, less than 1200 amino acids, less than 1190 amino acids, less than 1180 amino acids, less than 1170 amino acids, less than 1160 amino acids, less than 1150 amino acids, less than 1140 amino acids, less than 1130 amino acids, less than 1120 amino acids, less than 1110 amino acids, less than 1100 amino acids, less than 1050 amino acids, less than 1000 amino acids, less than 950 amino acids, less than 900 amino acids, less than 850 amino acids, less than 800 amino acids, less than 750 amino acids, less than 700 amino acids, less than 650 amino acids, less than 600 amino acids, less than 550 amino acids, or less than 500 amino acids, but at least larger than about 400 amino acids and retaining the one or more functions, e.g., DNA binding function, of the Cas9 protein.

[0494] In some embodiments, the Cas protein may include any CRISPR associated protein, including but not limited to, Cas12a, Cas12b1, Cas1, Cas1B, Cas2, Cas3, Cas4, Cas5, Cas6, Cas7, Cas8, Cas9 (also known as Csn1 and Csx12), Cas10, Csy1, Csy2, Csy3, Cse1, Cse2, Csc1, Csc2, Csa5, Csn2, Csm2, Csm3, Csm4, Csm5, Csm6, Cmr1, Cmr3, Cmr4, Cmr5, Cmr6, Csb1, Csb2, Csb3, Csx17, Csx14, Csx10, Csx16, CsaX, Csx3, Csx1, Csx15, Csf1, Csf2, Csf3, Csf4, homologs thereof, or modified versions thereof, and preferably comprising a nickase mutation (e.g., a mutation corresponding to the D10A mutation of the wild type Cas9 polypeptide of SEQ ID NO: 3580). In various other embodiments, the polypeptide domain having DNA binding activity can be any of the following proteins: a Cas9, a Cas12a (Cpf1), a Cas12e (CasX), a Cas12d (CasY), a Cas12b1 (C201), a Cas13a (C2c2), a Cas12c (C2c3), a GeoCas9, a CjCas9, a Cas12g, a Cas12h, a Cas12i, a Cas13b, a Cas13c, a Cas13d, a Cas14, a Csn2, an xCas9, an SpCas9-NG, a circularly permuted Cas9, or an Argonaute (Ago) domain, or a functional variant or fragment thereof.

### Exemplary Cas Proteins and Nomenclature are Shown in Table 44 Below:

TABLE 44

| Legacy nomenclature | Current nomenclature |
|---|---|
| type II CRISPR-Cas enzymes | |
| Cas9 | same |
| type V CRISPR-Cas enzymes | |
| Cpf1 | Cas12a |
| CasX | Cas12e |
| C2c1 | Cas12b1 |
| Cas12b2 | same |
| C2c3 | Cas12c |
| CasY | Cas12d |
| C2c4 | same |
| C2c8 | same |
| C2c5 | same |
| C2c10 | same |
| C2c9 | same |
| type VI CRISPR-Cas enzymes | |
| C2c2 | Cas13a |
| Cas13d | same |
| C2c7 | Cas13c |
| C2c6 | Cas13b |

[0496] In some embodiments, a prime editor as described herein may comprise a Cas12a (Cpf1) polypeptide or functional variants thereof. In some embodiments, the Cas12a polypeptide comprises a mutation that reduces or abolishes the endonuclease domain of the Cas12a polypeptide. In some embodiments, the Cas12a polypeptide is a Cas12a nickase. In some embodiments, the Cas protein comprises an amino acid sequence that comprises at least about 50%, 60%, 70%, 80%, 90%, 91%, 92%, 93%, 94%, 95%, 96%, 97%, 98%, 99%, or 100% sequence identity to a naturally occurring Cas12a polypeptide.

[0497] In some embodiments, a prime editor comprises a Cas protein that is a Cas12b (C2c1) or a Cas12c (C2c3) polypeptide. In some embodiments, the Cas protein comprises an amino acid sequence that comprises at least about 50%, 60%, 70%, 80%, 90%, 91%, 92%, 93%, 94%, 95%, 96%, 97%, 98%, 99%, or 100% sequence identity to a naturally occurring Cas12b (C2c1) or Cas12c (C2c3) protein. In some embodiments, the Cas protein is a Cas12b nickase or a Cas12c nickase. In some embodiments, the Cas protein is a Cas12e, a Cas12d, a Cas13, Cas14a, Cas14b, Cas14c, Cas14d, Cas14e, Cas14f, Cas14g, Cas14h, Cas14u, or a Casq polypeptide. In some embodiments, the Cas protein comprises an amino acid sequence that comprises at least about 50%, 60%, 70%, 80%, 90%, 91%, 92%, 93%, 94%, 95%, 96%, 97%, 98%, 99%, or 100% sequence identity to a naturally-occurring Cas12e, Cas12d, Cas13, Cas14a, Cas14b, Cas14c, Cas14d, Cas14e, Cas14f, Cas14g, Cas14h, Cas14u, or Cas q protein. In some embodiments, the Cas protein is a Cas12e, Cas12d, Cas13, or Cas q nickase.

### Flap Endonuclease

[0498] In some embodiments, a prime editor further comprises additional polypeptide components, for example, a flap endonuclease (FEN, e.g., FEN1). In some embodiments, the flap endonuclease excises the 5′ single stranded DNA of the edit strand of the target gene and assists incorporation of the intended nucleotide edit into the target gene. In some embodiments, the FEN is linked or fused to another component. In some embodiments, the FEN is provided in trans, for example, as a separate polypeptide or polynucleotide encoding the FEN.

[0499] In some embodiments, a prime editor or prime editing composition comprises a flap nuclease. In some embodiments, the flap nuclease is a FEN1, or any FEN1 functional variant, functional mutant, or functional fragment thereof. In some embodiments, the flap nuclease is a TREX2, EXO1, or any other flap nuclease known in the art, or any functional variant, functional mutant, or functional fragment thereof. In some embodiments, the flap nuclease has an amino acid sequence that is at least about 70% identical, at least about 80% identical, at least about 90% identical, at least about 95% identical, at least about 96% identical, at least about 97% identical, at least about 98% identical, at least about 99% identical, at least about 99.5% identical, or at least about 99.9% identical to any of the flap nucleases described herein or known in the art.

### Nuclear Localization Sequences

[0500] In some embodiments, a prime editor further comprises one or more nuclear localization sequence (NLS). In some embodiments, the NLS helps promote translocation of a protein into the cell nucleus. In some embodiments, a prime editor comprises a fusion protein, e.g., a fusion protein comprising a DNA binding domain and a DNA polymerase, that comprises one or more NLSs. In some embodiments, one or more polypeptides of the prime editor are fused to or linked to one or more NLSs. In some embodiments, the prime editor comprises a DNA binding domain and a DNA polymerase domain that are provided in trans, wherein the DNA binding domain and/or the DNA polymerase domain is fused or linked to one or more NLSs.

[0501] In certain embodiments, a prime editor or prime editing composition comprises at least one NLS. In some embodiments, a prime editor or prime editing composition comprises at least two NLSs. In embodiments with at least two NLSs, the NLSs can be the same NLS, or they can be different NLSs.

[0502] In some instances, a prime editor may further comprise at least one nuclear localization sequence (NLS). In some cases, a prime editor may further comprise one NLS. In some cases, a prime editor may further comprise two NLSs. In other cases, a prime editor may further comprise three NLSs. In one case, a primer editor may further comprise more than 4, 5, 6, 7, 8, 9 or 10 NLSs.

[0503] In addition, the NLSs may be expressed as part of a prime editor or prime editing composition. In some embodiments, a NLS can be positioned almost anywhere in a protein's amino acid sequence, and generally comprises a short sequence of three or more or four or more amino acids. The location of the NLS fusion can be at the N-terminus, the C-terminus, or positioned anywhere within a sequence of a prime editor or a component thereof (e.g., inserted between the DNA-binding domain and the DNA polymerase domain of a prime editor fusion protein, between the DNA binding domain and a linker sequence, between a DNA polymerase and a linker sequence, between two linker sequences of a prime editor fusion protein or a component thereof, in either N-terminus to C-terminus or C-terminus to N-terminus order). In some embodiments, a prime editor is a fusion protein that comprises an NLS at the N terminus. In some embodiments, a prime editor is a fusion protein that comprises an NLS at the C terminus. In some embodiments, a prime editor is a fusion protein that comprises at least one NLS at both the N terminus and the C terminus. In some embodiments, the prime editor is a fusion protein that comprises two NLSs at the N terminus and/or the C terminus.

[0504] Any NLSs that are known in the art are also contemplated herein. The NLSs may be any naturally occurring NLS, or any non-naturally occurring NLS (e.g., an NLS with one or more mutations relative to a wild-type NLS). In some embodiments, the one or more NLSs of a prime editor comprise bipartite NLSs. In some embodiments, a nuclear localization signal (NLS) is predominantly basic. In some embodiments, the one or more NLSs of a prime editor are rich in lysine and arginine residues. In some embodiments, the one or more NLSs of a prime editor comprise proline residues. In some embodiments, a nuclear localization signal (NLS) comprises the sequence MDSLLMNRRKFLYQFKNVRWAKGRRETYLC (SEQ ID NO: 3610), MKRTADGSEFESPKKKRKV (SEQ ID NO: 3609), KRTADGSEFEPKKKRKV (SEQ ID NO: 3773), NLSKRPAAIKKAGQAKKKK (SEQ ID NO: 3774), RQRRNELKRSF, or NQSSNFGPMKGGNFGGRSSGPYGGGGQYFAKPRNQGGY (SEQ ID NO: 3775).

[0505] In some embodiments, a NLS is a monopartite NLS. For example, in some embodiments, a NLS is a SV40 large T antigen NLS (PKKKRKV (SEQ ID NO: 3608)). In some embodiments, a NLS is a bipartite NLS. In some embodiments, a bipartite NLS comprises two basic domains separated by a linker comprising a variable number of amino acids. In some embodiments, a NLS is a bipartite NLS. In some embodiments, a bipartite NLS consists of two basic domains separated by a linker comprising a variable number of amino acids. In some embodiments, the linker amino acid sequence comprises the sequence (KRXXXXXXXXXXKKKL, SEQ ID NO: 3776), wherein X is any amino acid. In some embodiments, the NLS comprises a nucleoplasmin NLS sequence KRPAATKKAGQAKKKK (SEQ ID NO: 3777). In some embodiments, a NLS is a noncanonical sequences such as M9 of the hnRNP A1 protein, the influenza virus nucleoprotein NLS, and the yeast Gal4 protein NLS.

[0506] Other non-limiting examples of NLS sequences are provided in Table 45 below.

TABLE 45
Exemplary nuclear localization sequences

| Description | Sequence | SEQ ID NO: |
|---|---|---|
| NLS of SV40 | PKKKRKV | 3608 |
| Large T-AG | | |
| NLS | MKRTADGSEFESPKKKRKV | 3609 |
| NLS | MDSLLMNRRKFLYQFKNVRWAKGRRETYLC | 3610 |
| NLS of | AVKRPAATKKAGQAKKKKLD | 3611 |
| Nucleoplasmin | | |
| NLS of EGL-13 | MSRRRKANPTKLSENAKKLAKEVEN | 3612 |
| NLS of C-Myc | PAAKRVKLD | 3613 |
| NLS of Tus- | KLKIKRPVK | 3614 |
| protein | | |
| NLS of polyoma | VSRKRPRP | 3615 |
| large T-AG | | |
| NLS of Hepatitis | EGAPPAKRAR | 3616 |
| D virus antigen | | |
| NLS of murine | PPQPKKKPLDGE | 3617 |
| p53 | | |
| C-terminal NLS | SGGSKRTADGSEFEPKKKRKV | 3618 |
| and linker for | | |
| exemplary PE | | |
| fusio protein | | |

### Additional Prime Editor Components

[0507] A prime editor described herein may comprise additional functional domains, for example, one or more domains that modify the folding, solubility, or charge of the prime editor. In some instances, the prime editor may comprise a solubility-enhancement (SET) domain.

[0508] In some embodiments, a split intein comprises two halves of an intein protein, which may be referred to as a N-terminal half of an intein, or intein-N, and a C-terminal half of an intein, or intein-C, respectively. In some embodiments, the intein-N and the intein-C may each be fused to a protein domain (the N-terminal and the C-terminal exteins). The exteins can be any protein or polypeptides, for example, any prime editor polypeptide component. In some embodiments, the intein-N and intein-C of a split intein can associate non-covalently to form an active intein and catalyze a trans splicing reaction. In some embodiments, the trans splicing reaction excises the two intein sequences and links the two extein sequences with a peptide bond. As a result, the intein-N and the intein-C are spliced out, and a protein domain linked to the intein-N is fused to a protein domain linked to the intein-C essentially in same way as a contiguous intein does. In some embodiments, a split-intein is derived from a eukaryotic intein, a bacterial intein, or an archaeal intein. Preferably, the split intein so-derived will possess only the amino acid sequences essential for catalyzing trans-splicing reactions. In some embodiments, an intein-N or an intein-C further comprise one or more amino acid substitutions as compared to a wild type intein-N or wild type intein-C, for example, amino acid substitutions that enhances the trans-splicing activity of the split intein. In some embodiments, the intein-C comprises 4 to 7 contiguous amino acid residues, wherein at least 4 amino acids of which are from the last β-strand of the intein from which it was derived. In some embodiments, the split intein is derived from a Ssp DnaE intein, e.g., Synechocytis sp. PCC6803, or any intein or split intein known in the art, or any functional variants or fragments thereof.

[0509] In some embodiments, a prime editor comprises one or more epitope tags. Non-limiting examples of epitope tags include histidine (His) tags, V5 tags, FLAG tags, influenza hemagglutinin (HA) tags, Myc tags, VSV-G tags, thioredoxin (Trx) tags, biotin carboxylase carrier protein (BCCP) tags, myc-tags, calmodulin-tags, polyhistidine tags, also referred to as histidine tags or His-tags, maltose binding protein (MBP)-tags, nus-tags, glutathione-S-transferase (GST)-tags, green fluorescent protein (GFP)-tags, thioredoxin-tags, S-tags, Softags (e.g., Softag 1, Softag 3), strep-tags, biotin ligase tags, FlAsH tags, V5 tags, and SBP-tags. Additional suitable sequences will be apparent to those of skill in the art. In some embodiments, the fusion protein comprises one or more His tags.

[0510] In some embodiments, a prime editor comprises one or more polypeptide domains encoded by one or more reporter genes. Examples of reporter genes include, but are not limited to, glutathione-S-transferase (GST), horseradish peroxidase (HRP), chloramphenicol acetyltransferase (CAT), beta-galactosidase, beta-glucuronidase, luciferase, green fluorescent protein (GFP), HcRed, DsRed, cyan fluorescent protein (CFP), yellow fluorescent protein (YFP), and autofluorescent proteins including blue fluorescent protein (BFP).

[0511] In some embodiments, a prime editor comprises one or more polypeptide domains that binds DNA molecules or binds other cellular molecules. Examples of binding proteins or domains include, but are not limited to, maltose binding protein (MBP), S-tag, Lex A DNA binding domain (DBD) fusions, GAL4 DNA binding domain fusions, and herpes simplex virus (HSV) BP16 protein fusions.

[0512] Polypeptides comprising components of a prime editor may be fused via peptide linkers, or may be provided in trans relative to each other. For example, a reverse transcriptase may be expressed, delivered, or otherwise provided as an individual component rather than as a part of a fusion protein with the DNA binding domain. In such cases, components of the prime editor may be associated through non-peptide linkages or co-localization functions. In some embodiments, a prime editor further comprises additional components capable of interacting with, associating with, or capable of recruiting other components of the prime editor or the prime editing system. For example, a prime editor may comprise an RNA-protein recruitment polypeptide that can associate with an RNA-protein recruitment RNA aptamer. In some embodiments, an RNA-protein recruitment polypeptide can recruit, or be recruited by, a specific RNA sequence. Non limiting examples of RNA-protein recruitment polypeptide and RNA aptamer pairs include a MS2 coat protein and a MS2 RNA hairpin, a PCP polypeptide and a PP7 RNA hairpin, a Com polypeptide and a Com RNA hairpin, a Ku protein and a telomerase Ku binding RNA motif, and a Sm7 protein and a telomerase Sm7 binding RNA motif. In some embodiments, the prime editor comprises a DNA binding domain fused or linked to an RNA-protein recruitment polypeptide. In some embodiments, the prime editor comprises a DNA polymerase domain fused or linked to an RNA-protein recruitment polypeptide. In some embodiments, the DNA binding domain and the DNA polymerase domain fused to the RNA-protein recruitment polypeptide, or the DNA binding domain fused to the RNA-protein recruitment polypeptide and the DNA polymerase domain are co-localized by the corresponding RNA-protein recruitment RNA aptamer of the RNA-protein recruitment polypeptide. In some embodiments, the corresponding RNA-protein recruitment RNA aptamer is fused or linked to a portion of the PEgRNA. For example, an MS2 coat protein may be fused or linked to the DNA polymerase and a MS2 hairpin installed on the PEgRNA for co-localization of the DNA polymerase and the RNA-guided DNA binding domain (e.g., a Cas9 nickase).

[0513] In some embodiments, a prime editor comprises a polypeptide domain, an MS2 coat protein (MCP or MS2cp), that recognizes an MS2 hairpin. In some embodiments, the nucleotide sequence of the MS2 hairpin (or equivalently referred to as the “MS2 aptamer”) is: GCCAACATGAGGATCACCCATGTCTGCAGGGCC (SEQ ID NO: 3619). In some embodiments, the amino acid sequence of the MCP is:

(SEQ ID NO: 3620)
GSASNFTQFVLVDNGGTGDVTVAPSNFANGVAEWISSNSRSQAYKVTCS
VRQSSAQNRKYTIKVEVPKVATQTVGGEELPVAGWRSYLNMELTIPIFA
TNSDCELIVKAMQGLLKDGNPIPSAIA ANSGIY.

[0514] In certain embodiments, components of a prime editor are directly fused to each other. In certain embodiments, components of a prime editor are associated to each other via a linker.

[0515] As used herein, a linker can be any chemical group or a molecule linking two molecules or moieties, e.g., a DNA binding domain and a polymerase domain of a prime editor. In some embodiments, a linker is an organic molecule, group, polymer, or chemical moiety. In some embodiments, the linker comprises a non-peptide moiety. The linker may be as simple as a covalent bond, or it may be a polymeric linker many atoms in length, for example, a polynucleotide sequence. In certain embodiments, the linker is a covalent bond (e.g., a carbon-carbon bond, disulfide bond, carbon-heteroatom bond, etc.).

[0516] In certain embodiments, two or more components of a prime editor are linked to each other by a peptide linker. In some embodiments, a peptide linker is 5-100 amino acids in length, for example, 2, 3, 4, 5, 6, 7, 8, 9, 10, 11, 12, 13, 14, 15, 16, 17, 18, 19, 20, 21, 22, 23, 24, 25, 26, 27, 28, 29, 30, 30-35, 35-40, 40-45, 45-50, 50-60, 60-70, 70-80, 80-90, 90-100, 100-150, or 150-200 amino acids in length. In some embodiments, the peptide linker is 16 amino acids in length, 24 amino acids in length, 64 amino acids in length, or 96 amino acids in length.

[0517] In some embodiments, the linker comprises the amino acid sequence (GGGGS)n (SEQ ID NO: 3627), (G)n (SEQ ID NO: 3628), (EAAAK)n (SEQ ID NO: 3629), (GGS)n (SEQ ID NO: 3630), (SGGS)n (SEQ ID NO: 3631), (XP)n (SEQ ID NO: 3632), or any combination thereof, wherein n is independently an integer between 1 and 30, and wherein X is any amino acid. In some embodiments, the linker comprises the amino acid sequence (GGS)n (SEQ ID NO: 3630), wherein n is 1, 3, or 7. In some embodiments, the linker comprises the amino acid sequence SGSETPGTSESATPES (SEQ ID NO: 3633). In some embodiments, the linker comprises the amino acid sequence SGGSSGGSSGSETPGTSESATPESSGGSSGGS (SEQ ID NO: 3634). In some embodiments, the linker comprises the amino acid sequence SGGSSGGSSGSETPGTSESATPESSGGSSGGSS (SEQ ID NO: 3635). In some embodiments, the linker comprises the amino acid sequence SGGSGGSGGS (SEQ ID NO: 3636). In some embodiments, the linker comprises the amino acid sequence SGGS (SEQ ID NO: 3637). In other embodiments, the linker comprises the amino acid sequence SGGSSGGSSGSETPGTSESATPESAGSYPYDVPDYAGSAAPAAKKKKLDGSGSGGSSGG S (SEQ ID NO: 3638).

[0518] In certain embodiments, two or more components of a prime editor are linked to each other by a non-peptide linker. In some embodiments, the linker is a carbon-nitrogen bond of an amide linkage. In certain embodiments, the linker is a cyclic or acyclic, substituted or unsubstituted, branched or unbranched aliphatic or heteroaliphatic linker. In certain embodiments, the linker is polymeric (e.g., polyethylene, polyethylene glycol, polyamide, polyester, etc.). In certain embodiments, the linker comprises a monomer, dimer, or polymer of aminoalkanoic acid. In certain embodiments, the linker comprises an aminoalkanoic acid (e.g., glycine, ethanoic acid, alanine, beta-alanine, 3-aminopropanoic acid, 4-aminobutanoic acid, 5-pentanoic acid, etc.). In certain embodiments, the linker comprises a monomer, dimer, or polymer of aminohexanoic acid (Ahx). In certain embodiments, the linker is based on a carbocyclic moiety (e.g., cyclopentane, cyclohexane). In other embodiments, the linker comprises a polyethylene glycol moiety (PEG). In certain embodiments, the linker comprises an aryl or heteroaryl moiety. In certain embodiments, the linker is based on a phenyl ring. The linker may include functionalized moieties to facilitate attachment of a nucleophile (e.g., thiol, amino) from the peptide to the linker. Any electrophile may be used as part of the linker. Exemplary electrophiles include, but are not limited to, activated esters, activated amides, Michael acceptors, alkyl halides, aryl halides, acyl halides, and isothiocyanates.

[0519] Components of a prime editor may be connected to each other in any order. In some embodiments, the DNA binding domain and the DNA polymerase domain of a prime editor may be fused to form a fusion protein, or may be joined by a peptide or protein linker, in any order from the N terminus to the C terminus. In some embodiments, a prime editor comprises a DNA binding domain fused or linked to the C-terminal end of a DNA polymerase domain. In some embodiments, a prime editor comprises a DNA binding domain fused or linked to the N-terminal end of a DNA polymerase domain. In some embodiments, the prime editor comprises a fusion protein comprising the structure NH2-[DNA binding domain]-[DNA polymerase]-CooH; or NH2-[DNA polymerase]-[DNA binding domain]-COOH, wherein each instance of “]-[” indicates the presence of an optional linker sequence. In some embodiments, a prime editor comprises a fusion protein and a DNA polymerase domain provided in trans, wherein the fusion protein comprises the structure NH2-[DNA binding domain]-[RNA-protein recruitment polypeptide]-COOH. In some embodiments, a prime editor comprises a fusion protein and a DNA binding domain provided in trans, wherein the fusion protein comprises the structure NH2-[DNA polymerase domain]-[RNA-protein recruitment polypeptide]-COOH.

[0520] In some embodiments, a prime editor fusion protein, a polypeptide component of a prime editor, or a polynucleotide encoding the prime editor fusion protein or polypeptide component, may be split into an N-terminal half and a C-terminal half or polypeptides that encode the N-terminal half and the C terminal half, and provided to a target DNA in a cell separately. For example, in certain embodiments, a prime editor fusion protein may be split into a N-terminal and a C-terminal half for separate delivery in AAV vectors, and subsequently translated and colocalized in a target cell to reform the complete polypeptide or prime editor protein. In such cases, separate halves of a protein or a fusion protein may each comprise a split-intein to facilitate colocalization and reformation of the complete protein or fusion protein by the mechanism of intein facilitated trans splicing. In some embodiments, a prime editor comprises a N-terminal half fused to an intein-N, and a C-terminal half fused to an intein-C, or polynucleotides or vectors (e.g., AAV vectors) encoding each thereof. When delivered and/or expressed in a target cell, the intein-N and the intein-C can be excised via protein trans-splicing, resulting in a complete prime editor fusion protein in the target cell.

[0521] The amino acid sequence of an exemplary prime editor (PE) fusion protein and its individual components is shown in Table 46. Table 47 also includes the amino acid sequence of an exemplary prime editor (PE) fusion protein and its individual components.

[0522] In some embodiments, a prime editing composition comprises a fusion protein comprising a DNA binding domain (e.g., Cas9(H840A)) and a reverse transcriptase (e.g., a variant M-MLV RT) having the following structure: [NLS]-[Cas9(H840A)]-[linker]-[M-MLV_RT(D200N)(T330P)(L603W)(T306K)(W313F)], and one or more desired PEgRNAs. In some embodiments, the prime editing composition comprises a prime editor fusion protein that has the amino acid sequence of SEQ ID NO: 3621.

[0523] In various embodiments, a prime editor fusion protein comprises an amino acid sequence that is at least about 70% identical, at least about 80% identical, at least about 90% identical, at least about 95% identical, at least about 96% identical, at least about 97% identical, at least about 98% identical, at least about 99% identical, at least about 99.5% identical, or at least about 99.9% identical to the exemplary PE fusion protein provided below, or any of the prime editor fusion sequences described herein or known in the art.

TABLE 46
Amino acid sequence of exemplary PE and its individual components

| DESCRIPTION | SEQUENCE |
|---|---|
| PE FUSION | MKRTADGSEFESPKKKRKVDKKYSIGLDIGTNSVGWAVITDEYKVPSKKFK |
| PROTEIN | VLGNTDRHSIKKNLIGALLFDSGETAEATRLKRTARRRYTRRKNRICYLQ |
| CAS9(H840A)- | EIFSNEMAKVDDSFFHRLEESFLVEEDKKHERHPIFGNIVDEVAYHEKYPT |
| MMLV_RT | IYHLRKKLVDSTDKADLRLIYLALAHMIKFRGHFLIEGDLNPDNSDVDKL |
| D200N T330P | FIQLVQTYNQLFEENPINASGVDAKAILSARLSKSRRLENLIAQLPGEKKN |
| L603W T306K | GLFGNLIALSLGLTPNFKSNFDLAEDAKLQLSKDTYDDDLDNLLAQIGDQ |
| W313F | YADLFLAAKNLSDAILLSDILRVNTEITKAPLSASMIKRYDEHHQDLTLLK |
| | ALVRQQLPEKYKEIFFDQSKNGYAGYIDGGASQEEFYKFIKPILEKMDGT |
| | EELLVKLNREDLLRKQRTFDNGSIPHQIHLGELHAILRRQEDFYPFLKDN |
| | REKIEKILTFRIPYYVGPLARGNSRFAWMTRKSEETITPWNFEEVVDKGAS |
| | AQSFIERMTNFDKNLPNEKVLPKHSLLYEYFTVYNELTKVKYVTEGMRK |
| | PAFLSGEQKKAIVDLLFKTNRKVTVKQLKEDYFKKIECFDSVEISGVEDR |
| | FNASLGTYHDLLKIIKDKDFLDNEENEDILEDIVLTLTLFEDREMIEERLKT |
| | YAHLFDDKVMKQLKRRRYTGWGRLSRKLINGIRDKQSGKTILDFLKSDG |
| | FANRNFMQLIHDDSLTFKEDIQKAQVSGQGDSLHEHIANLAGSPAIKKGIL |
| | QTVKVVDELVKVMGRHKPENIVIEMARENQTTQKGQKNSRERMKRIEE |
| | GIKELGSQILKEHPVENTQLQNEKLYLYYLQNGRDMYVDQELDINRLSDY |
| | DVDAIVPQSFLKDDSIDNKVLTRSDKNRGKSDNVPSEEVVKKMKNYWRQ |
| | LLNAKLITQRKFDNLTKAERGGLSELDKAGFIKRQLVETRQITKHVAQIL |
| | DSRMNTKYDENDKLIREVKVITLKSKLVSDFRKDFQFYKVREINNYHHAH |
| | DAYLNAVVGTALIKKYPKLESEFVYGDYKVYDVRKMIAKSEQEIGKATAK |
| | YFFYSNIMNFFKTEITLANGEIRKRPLIETNGETGEIVWDKGRDFATVRKV |
| | LSMPQVNIVKKTEVQTGGFSKESILPKRNSDKLIARKKDWDPKKYGGFD |
| | SPTVAYSVLVVAKVEKGKSKKLKSVKELLGITIMERSSFEKNPIDFLEAKG |
| | YKEVKKDLIIKLPKYSLFELENGRKRMLASAGELQKGNELALPSKYVNFL |
| | YLASHYEKLKGSPEDNEQKQLFVEQHKHYLDEIIEQISEFSKRVILADANL |
| | DKVLSAYNKHRDKPIREQAENIIHLFTLTNLGAPAAFKYFDTTIDRKRYTS |
| | TKEVLDATLIHQSITGLYETRIDLSQLGGDSGGSSGGSSGSETPGTSESATP |
| | ESSGGSSGGSSTLNIEDEYRLHETSKEPDVSLGSTWLSDFPQAWAETGGMGLAVR |
| | QAPLIIPLKATSTPVSIKQYPMSQEARLGIKPHIQRLLDQGILVPCQSPWNTPLLPVK |
| | KPGTNDYRPVQDLREVNKRVEDIHPTVPNPYNLLSGLPPSHQWYTVLDLKDAFFC |
| | LRLHPTSQPLFAFEWRDPEMGISGQLTWTRLPQGFKNSPTLFNEALHRDLADFRI |
| | QHPDLILLQYVDDLLLAATSELDCQQGTRALLQTLGNLGYRASAKKAQICQKQVKY |
| | LGYLLKEGQRWLTEARKETVMGQPTPKTPRQLREFLGKAGFCRLFIPGFAEMAAP |
| | LYPLTKPGTLFNWGPDQQKAYQEIKQALLTAPALGLPDLTKPFELFVDEKQGYAK |
| | GVLTQKLGPWRRPVAYLSKKLDPVAAGWPPCLRMVAAIAVLTKDAGKLTMGQPLV |
| | ILAPHAVEALVKQPPDRWLSNARMTHYQALLLDTDRVQFGPVVALNPATLLPLPEE |
| | GLQHNCLDILAEAHGTRPDLTDQPLPDADHTWYTDGSSLLQEGQRKAGAAVTTET |
| | EVIWAKALPAGTSAQRAELIALTQALKMAEGKKLNVYTDSRYAFATAHIHGEIYRRRG |
| | WLTSEGKEIKNKDEILALLKALFLPKRLSIIHCPGHQKGHSAEARGNRMADQAARK |
| | AAITETPDTSTLLIENSSPSGGSKRTADGSEFEPKKKRKV (SEQ ID NO: 3621) |
| | KEY: |
| | NUCLEAR LOCALIZATION SEQUENCE (NLS) |
| | CAS9(H840A) |
| | 33-AMINO ACID LINKER |
| | M-MLV REVERSE TRANSCRIPTASE |
| N- TERMINAL | MKRTADGSEFESPKKKRKV (SEQ ID NO: 3609) |
| NLS | |
| CAS9 (H840A) | DKKYSIGLDIGTNSVGWAVITDEYKVPSKKFKVLGNTDRHSIKKNLIGALLFDS |
| (MET MINUS) | GETAEATRLKRTARRRYTRRKNRICYLQEIFSNEMAKVDDSFFHRLEESFLVEE |
| | DKKHERHPIFGNIVDEVAYHEKYPTIYHLRKKLVDSTDKADLRLIYLALAHMI |
| | KFRGHFLIEGDLNPDNSDVDKLFIQLVQTYNQLFEENPINASGVDAKAILSARL |
| | SKSRRLENLIAQLPGEKKNGLFGNLIALSLGLTPNFKSNFDLAEDAKLQLSKDT |
| | YDDDLDNLLAQIGDQYADLFLAAKNLSDAILLSDILRVNTEITKAPLSASMIKR |
| | YDEHHQDLTLLKALVRQQLPEKYKEIFFDQSKNGYAGYIDGGASQEEFYKFIK |
| | PILEKMDGTEELLVKLNREDLLRKQRTFDNGSIPHQIHLGELHAILRRQEDFYP |
| | FLKDNREKIEKILTFRIPYYVGPLARGNSRFAWMTRKSEETITPWNFEEVVDKG |
| | ASAQSFIERMTNFDKNLPNEKVLPKHSLLYEYFTVYNELTKVKYVTEGMRKP |
| | AFLSGEQKKAIVDLLFKTNRKVTVKQLKEDYFKKIECFDSVEISGVEDRFNAS |
| | LGTYHDLLKIIKDKDFLDNEENEDILEDIVLTLTLFEDREMIEERLKTYAHLFDD |
| | KVMKQLKRRRYTGWGRLSRKLINGIRDKQSGKTILDFLKSDGFANRNFMQLI |
| | HDDSLTFKEDIQKAQVSGQGDSLHEHIANLAGSPAIKKGILQTVKVVDELVKV |
| | MGRHKPENIVIEMARENQTTQKGQKNSRERMKRIEEGIKELGSQILKEHPVEN |
| | TQLQNEKLYLYYLQNGRDMYVDQELDINRLSDYDVDAIVPQSFLKDDSIDNK |
| | VLTRSDKNRGKSDNVPSEEVVKKMKNYWRQLLNAKLITQRKFDNLTKAERG |
| | GLSELDKAGFIKRQLVETRQITKHVAQILDSRMNTKYDENDKLIREVKVITLKS |
| | KLVSDFRKDFQFYKVREINNYHHAHDAYLNAVVGTALIKKYPKLESEFVYGD |
| | YKVYDVRKMIAKSEQEIGKATAKYFFYSNIMNFFKTEITLANGEIRKRPLIETN |
| | GETGEIVWDKGRDFATVRKVLSMPQVNIVKKTEVQTGGFSKESILPKRNSDKL |
| | IARKKDWDPKKYGGFDSPTVAYSVLVVAKVEKGKSKKLKSVKELLGITIMERS |
| | SFEKNPIDFLEAKGYKEVKKDLIIKLPKYSLFELENGRKRMLASAGELQKGNE |
| | LALPSKYVNFLYLASHYEKLKGSPEDNEQKQLFVEQHKHYLDEIIEQISEFSKR |
| | VILADANLDKVLSAYNKHRDKPIREQAENIIHLFTLTNLGAPAAFKYFDTTIDR |
| | KRYTSTKEVLDATLIHQSITGLYETRIDLSQLGGD (SEQ ID NO: 3582) |
| LINKER | SGGSSGGSSGSETPGTSESATPESSGGSSGGSS (SEQ ID NO: 3635) |
| BETWEEN | |
| CAS9 | |
| DOMAIN AND | |
| RT DOMAIN | |
| (33 AMINO | |
| ACIDS) | |
| MMLV_RT | TLNIEDEYRLHETSKEPDVSLGSTWLSDFPQAWAETGGMGLAVRQAPLIIPLK |
| D200N | ATSTPVSIKQYPMSQEARLGIKPHIQRLLDQGILVPCQSPWNTPLLPVKKPGTN |
| T330P | DYRPVQDLREVNKRVEDIHPTVPNPYNLLSGLPPSHQWYTVLDLKDAFFCLR |
| L603W | LHPTSQPLFAFEWRDPEMGISGQLTWTRLPQGFKNSPTLFNEALHRDLADFRI |
| T306K | QHPDLILLQYVDDLLLAATSELDCQQGTRALLQTLGNLGYRASAKKAQICQK |
| W313F | QVKYLGYLLKEGQRWLTEARKETVMGQPTPKTPRQLREFLGKAGFCRLFIPG |
| | FAEMAAPLYPLTKPGTLFNWGPDQQKAYQEIKQALLTAPALGLPDLTKPFELF |
| | VDEKQGYAKGVLTQKLGPWRRPVAYLSKKLDPVAAGWPPCLRMVAAIAVLT |
| | KDAGKLTMGQPLVILAPHAVEALVKQPPDRWLSNARMTHYQALLLDTDRVQ |
| | FGPVVALNPATLLPLPEEGLQHNCLDILAEAHGTRPDLTDQPLPDADHTWYTD |
| | GSSLLQEGQRKAGAAVTTETEVIWAKALPAGTSAQRAELIALTQALKMAEGK |
| | KLNVYTDSRYAFATAHIHGEIYRRRGWLTSEGKEIKNKDEILALLKALFLPKRL |
| | SIIHCPGHQKGHSAEARGNRMADQAARKAAITETPDTSTLLIENSSP (SEQ ID NO: 3579) |
| C-TERMINAL | SGGSKRTADGSEFEPKKKRKV (SEQ ID NO: 3618) |
| NLS | |

TABLE 47
Amino acid sequence of exemplary PE and its individual components

| DESCRIPTION | SEQUENCE |
|---|---|
| Exemplary prime editor | MKRTADGSEFESPKKKRKVDKKYSIGLDIGTNSVGWAVITDEYKVPS |
| [NLS]- | KKFKVLGNTDRHSIKKNLIGALLFDSGETAEATRLKRTARRRYTRR |
| [Cas9((R220K) | KNRICYLQEIFSNEMAKVDDSFFHRLEESFLVEEDKKHERHPIFGNI |
| (R393K) (H839A)]- | VDEVAYHEKYPTIYHLRKKLVDSTDKADLRLIYLALAHMIKFRGHF |
| [linker]- | LIEGDLNPDNSDVDKLFIQLVQTYNQLFEENPINASGVDAKAILSARL |
| [MMLV_RT(D200N) | SKSRKLENLIAQLPGEKKNGLFGNLIALSLGLTPNFKSNFDLAEDAK |
| (T330P)(L603W)(T306K) | LQLSKDTYDDDLDNLLAQIGDQYADLFLAAKNLSDAILLSDILRVNT |
| (W313F)]- | EITKAPLSASMIKRYDEHHQDLTLLKALVRQQLPEKYKEIFFDQSKN |
| [NLS] | GYAGYIDGGASQEEFYKFIKPILEKMDGTEELLVKLKREDLLRKQR |
| | TFDNGSIPHQIHLGELHAILRRQEDFYPFLKDNREKIEKILTFRIPYY |
| | VGPLARGNSRFAWMTRKSEETITPWNFEEVVDKGASAQSFIERMTN |
| | FDKNLPNEKVLPKHSLLYEYFTVYNELTKVKYVTEGMRKPAFLSGE |
| | QKKAIVDLLFKTNRKVTVKQLKEDYFKKIECFDSVEISGVEDRFNAS |
| | LGTYHDLLKIIKDKDFLDNEENEDILEDIVLTLTLFEDREMIEERLKT |
| | YAHLFDDKVMKQLKRRRYTGWGRLSRKLINGIRDKQSGKTILDFL |
| | KSDGFANRNFMQLIHDDSLTFKEDIQKAQVSGQGDSLHEHIANLAG |
| | SPAIKKGILQTVKVVDELVKVMGRHKPENIVIEMARENQTTQKGQ |
| | KNSRERMKRIEEGIKELGSQILKEHPVENTQLQNEKLYLYYLQNGR |
| | DMYVDQELDINRLSDYDVDAIVPQSFLKDDSIDNKVLTRSDKNRGKS |
| | DNVPSEEVVKKMKNYWRQLLNAKLITQRKFDNLTKAERGGLSELD |
| | KAGFIKRQLVETRQITKHVAQILDSRMNTKYDENDKLIREVKVITL |
| | KSKLVSDFRKDFQFYKVREINNYHHAHDAYLNAVVGTALIKKYPKL |
| | ESEFVYGDYKVYDVRKMIAKSEQEIGKATAKYFFYSNIMNFFKTEIT |
| | LANGEIRKRPLIETNGETGEIVWDKGRDFATVRKVLSMPQVNIVKK |
| | TEVQTGGFSKESILPKRNSDKLIARKKDWDPKKYGGFDSPTVAYSV |
| | LVVAKVEKGKSKKLKSVKELLGITIMERSSFEKNPIDFLEAKGYKEV |
| | KKDLIIKLPKYSLFELENGRKRMLASAGELQKGNELALPSKYVNFL |
| | YLASHYEKLKGSPEDNEQKQLFVEQHKHYLDEIIEQISEFSKRVILA |
| | DANLDKVLSAYNKHRDKPIREQAENIIHLFTLTNLGAPAAFKYFDTT |
| | IDRKRYTSTKEVLDATLIHQSITGLYETRIDLSQLGGDSGGSSGGSKR |
| | TADGSEFESPKKKRKVSGGSSGGSTLNIEDEYRLHETSKEPDVSLGSTWL |
| | SDFPQAWAETGGMGLAVRQAPLIIPLKATSTPVSIKQYPMSQEARLGIKPHIQ |
| | RLLDQGILVPCQSPWNTPLLPVKKPGTNDYRPVQDLREVNKRVEDIHPTVP |
| | NPYNLLSGLPPSHQWYTVLDLKDAFFCLRLHPTSQPLFAFEWRDPEMGISG |
| | QLTWTRLPQGFKNSPTLFNEALHRDLADFRIQHPDLILLQYVDDLLLAATSE |
| | LDCQQGTRALLQTLGNLGYRASAKKAQICQKQVKYLGYLLKEGQRWLTEAR |
| | KETVMGQPTPKTPRQLREFLGKAGFCRLFIPGFAEMAAPLYPLTKPGTLFN |
| | WGPDQQKAYQEIKQALLTAPALGLPDLTKPFELFVDEKQGYAKGVLTQKL |
| | GPWRRPVAYLSKKLDPVAAGWPPCLRMVAAIAVLTKDAGKLTMGQPLVILA |
| | PHAVEALVKQPPDRWLSNARMTHYQALLLDTDRVQFGPVVALNPATLLPLP |
| | EEGLQHNCLDILAEAHGTRPDLTDQPLPDADHTWYTDGSSLLQEGQRKAG |
| | AAVTTETEVIWAKALPAGTSAQRAELIALTQALKMAEGKKLNVYTDSRYAFAT |
| | AHIHGEIYRRRGWLTSEGKEIKNKDEILALLKALFLPKRLSIIHCPGHQKGHS |
| | AEARGNRMADQAARKAAITETPDTSTLLIENSSPSGGSKRTADGSEFESPKKK |
| | RKVGSGPAAKRVKLD (SEQ ID NO: 3622) |
| | KEY: |
| | N-terminal bipartiteSV40NLS |
| | CAS9(R221K N394K H840A) |
| | SGGSx2-met-bpSV40NLS-SGGSx2 LINKER |
| | M-MLV D200N T306K W313F T330P L603W REVERSE TRANSCRIPTASE |
| | C-terminal linker-NLS1 |
| | C-terminal linker-NLS2 |
| -N-terminal | MKRTADGSEFESPKKKRKV (SEQ ID NO: 3609) |
| bpSV40NLS | |
| -CAS9 (R221K | DKKYSIGLDIGTNSVGWAVITDEYKVPSKKFKVLGNTDRHSIKKNLIGA |
| N394K H840A) | LLFDSGETAEATRLKRTARRRYTRRKNRICYLQEIFSNEMAKVDDSFFH |
| | RLEESFLVEEDKKHERHPIFGNIVDEVAYHEKYPTIYHLRKKLVDSTDK |
| | ADLRLIYLALAHMIKFRGHFLIEGDLNPDNSDVDKLFIQLVQTYNQLFEE |
| | NPINASGVDAKAILSARLSKSRKLENLIAQLPGEKKNGLFGNLIALSLGL |
| | TPNFKSNFDLAEDAKLQLSKDTYDDDLDNLLAQIGDQYADLFLAAKNL |
| | SDAILLSDILRVNTEITKAPLSASMIKRYDEHHQDLTLLKALVRQQLPEK |
| | YKEIFFDQSKNGYAGYIDGGASQEEFYKFIKPILEKMDGTEELLVKLKRE |
| | DLLRKQRTFDNGSIPHQIHLGELHAILRRQEDFYPFLKDNREKIEKILTFR |
| | IPYYVGPLARGNSRFAWMTRKSEETITPWNFEEVVDKGASAQSFIERMT |
| | NFDKNLPNEKVLPKHSLLYEYFTVYNELTKVKYVTEGMRKPAFLSGEQ |
| | KKAIVDLLFKTNRKVTVKQLKEDYFKKIECFDSVEISGVEDRFNASLGT |
| | YHDLLKIIKDKDFLDNEENEDILEDIVLTLTLFEDREMIEERLKTYAHLFD |
| | DKVMKQLKRRRYTGWGRLSRKLINGIRDKQSGKTILDFLKSDGFANRN |
| | FMQLIHDDSLTFKEDIQKAQVSGQGDSLHEHIANLAGSPAIKKGILQTVK |
| | VVDELVKVMGRHKPENIVIEMARENQTTQKGQKNSRERMKRIEEGIKE |
| | LGSQILKEHPVENTQLQNEKLYLYYLQNGRDMYVDQELDINRLSDYDV |
| | DAIVPQSFLKDDSIDNKVLTRSDKNRGKSDNVPSEEVVKKMKNYWRQL |
| | LNAKLITQRKFDNLTKAERGGLSELDKAGFIKRQLVETRQITKHVAQIL |
| | DSRMNTKYDENDKLIREVKVITLKSKLVSDFRKDFQFYKVREINNYHH |
| | AHDAYLNAVVGTALIKKYPKLESEFVYGDYKVYDVRKMIAKSEQEIGK |
| | ATAKYFFYSNIMNFFKTEITLANGEIRKRPLIETNGETGEIVWDKGRDFA |
| | TVRKVLSMPQVNIVKKTEVQTGGFSKESILPKRNSDKLIARKKDWDPKK |
| | YGGFDSPTVAYSVLVVAKVEKGKSKKLKSVKELLGITIMERSSFEKNPI |
| | DFLEAKGYKEVKKDLIIKLPKYSLFELENGRKRMLASAGELQKGNELAL |
| | PSKYVNFLYLASHYEKLKGSPEDNEQKQLFVEQHKHYLDEIIEQISEFSK |
| | RVILADANLDKVLSAYNKHRDKPIREQAENIIHLFTLTNLGAPAAFKYF |
| | DTTIDRKRYTSTKEVLDATLIHQSITGLYETRIDLSQLGGD (SEQ ID NO: |
| | 3623) |
| SGGSx2- | SGGSSGGSKRTADGSEFESPKKKRKVSGGSSGGS (SEQ ID NO: 3624) |
| bpSV40NLS-SGGSx2 | |
| linker | |
| -MMLV_RT D200N | TLNIEDEYRLHETSKEPDVSLGSTWLSDFPQAWAETGGMGLAVRQAPLI |
| T330P L603W T306K | IPLKATSTPVSIKQYPMSQEARLGIKPHIQRLLDQGILVPCQSPWNTPLLP |
| W313F | VKKPGTNDYRPVQDLREVNKRVEDIHPTVPNPYNLLSGLPPSHQWYTV |
| | LDLKDAFFCLRLHPTSQPLFAFEWRDPEMGISGQLTWTRLPQGFKNSPT |
| | LFNEALHRDLADFRIQHPDLILLQYVDDLLLAATSELDCQQGTRALLQT |
| | LGNLGYRASAKKAQICQKQVKYLGYLLKEGQRWLTEARKETVMGQPT |
| | PKTPRQLREFLGKAGFCRLFIPGFAEMAAPLYPLTKPGTLFNWGPDQQK |
| | AYQEIKQALLTAPALGLPDLTKPFELFVDEKQGYAKGVLTQKLGPWRR |
| | PVAYLSKKLDPVAAGWPPCLRMVAAIAVLTKDAGKLTMGQPLVILAPH |
| | AVEALVKQPPDRWLSNARMTHYQALLLDTDRVQFGPVVALNPATLLP |
| | LPEEGLQHNCLDILAEAHGTRPDLTDQPLPDADHTWYTDGSSLLQEGQ |
| | RKAGAAVTTETEVIWAKALPAGTSAQRAELIALTQALKMAEGKKLNV |
| | YTDSRYAFATAHIHGEIYRRRGWLTSEGKEIKNKDEILALLKALFLPKRL |
| | SIIHCPGHQKGHSAEARGNRMADQAARKAAITETPDTSTLLIENSSP |
| | (SEQ ID NO: 3579) |
| C-terminal linker-NLS | SGGSKRTADGSEFESPKKKRKV (SEQ ID NO: 3625) |
| C-terminal linker-NLS2 | GSGPAAKRVKLD (SEQ ID NO: 3626) |

### PEgRNA for Editing of DMPK Gene

[0524] The term “prime editing guide RNA”, or “PEgRNA”, refers to a guide polynucleotide that comprises one or more intended nucleotide edits for incorporation into the target double stranded DNA. In some embodiments, the PEgRNA associates with and directs a prime editor to incorporate the one or more intended nucleotide edits into the target gene via prime editing.

[0525] In some embodiments, a PEgRNA comprises a spacer that is complementary or substantially complementary to a search target sequence on a target strand of the target gene. In some embodiments, the PEgRNA comprises a gRNA core that associates with a DNA binding domain, e.g., a CRISPR-Cas protein domain, of a prime editor. In some embodiments, the PEgRNA comprises an editing template. In some embodiments, the PEgRNA comprises a primer binding site (PBS). In some embodiments, a PEgRNA comprises an extension arm that comprises an editing template and a primer binding site (PBS).

[0526] Dual prime editing involves two different PEgRNAs each complexed with a prime editor. In some embodiments, the prime editor is the same for each of the PEgRNA-prime editor complexes. In some embodiments, the prime editor is different for each of the PEgRNA-prime editor complexes. In some embodiments, each of the two PEgRNAs comprises a region of complementarity to a distinct search target sequence of the double stranded target DNA, wherein the two distinct search target sequences are on the two complementary strands of the double stranded target DNA. In some embodiments, the two PEgRNAs each can direct a prime editor to initiate the prime editing process on the two complementary strands of the double stranded target DNA. In some embodiments, each of the two PEgRNAs comprises a spacer complementary to a separate search target sequence. In some embodiments, each of the two PEgRNAs anneals with a separate search target sequence through its spacer.

[0527] In some embodiments, a first PEgRNA comprises a first spacer complementary to a first search target sequence on a first strand of a double stranded target DNA, e.g., a double stranded target gene. In the context of the first PEgRNA, the first strand of the double stranded target DNA may be referred to as a first target strand, and the complementary strand referred to as the first PAM strand. In some embodiments, a first PEgRNA comprises a first gRNA core. In some embodiments, a first PEgRNA comprises a first editing template. In certain embodiments, a first PEgRNA comprises a first primer binding site (PBS) that is complementary to a free 3′ end formed at the first nick site.

[0528] In some embodiments, a second PEgRNA comprises a second spacer complementary to a second search target sequence on a second strand of a double stranded target DNA, e.g., a double stranded target gene. In the context of the second PEgRNA, the second strand of the double stranded target DNA may be referred to as a second target strand, and the complementary strand referred to as the second PAM strand. In some embodiments, a second PEgRNA comprises a second gRNA core. In some embodiments, a second PEgRNA comprises a second editing template. In some embodiments, a second PEgRNA comprises a second primer binding site (PBS) that is complementary to a free 3′ end formed at the second nick site.

[0529] In certain embodiments, the first editing template of a first PEgRNA and the second editing template of a second PEgRNA comprise a region of complementarity to each other. In certain embodiments, the region of complementarity between the first editing template and the second editing template comprises a nucleotide sequence that is exogenous to the double stranded target DNA or target gene. In certain embodiments, the exogenous sequence may be a marker, expression tag, barcode or regulatory sequence. In certain embodiments, the region of complementarity between the first editing template and the second editing template comprises a nucleotide sequence that is at least partially identical to a sequence in the double stranded target DNA or target gene. In certain embodiments, the region of complementarity between the first editing template and the second editing template comprises a nucleotide sequence that is at least partially identical to a sequence in the IND.

[0530] In certain embodiments, the first editing template of a first PEgRNA and the second editing template of a second PEgRNA do not comprise a region of complementarity to each other. In certain embodiments, the first editing template of a first PEgRNA comprises region of identity to a sequence on the first target strand (or the first strand), and the second editing template comprises a region of identity to a sequence on the second target strand (or the second strand). In certain embodiments, the first editing template of a first PEgRNA comprises a region of identity to a sequence on the first target strand immediately adjacent to and outside the IND. In certain embodiments, the second editing template of a second PEgRNA comprises a region of identity to a sequence on the second target strand immediately adjacent to and outside the IND. In some embodiments, an editing template comprises one or more intended nucleotide edits to be incorporated in the double stranded target DNA, e.g., the DMPK gene, by prime editing. In some embodiments, incorporation of the newly synthesized single stranded DNA encoded by the editing template results in incorporation of one or more intended nucleotide edit in the double stranded target DNA, e.g., the DMPK gene, compared to the endogenous sequence of the double stranded target gene. For example, in some embodiments, the one or more intended nucleotide edits comprises deletion, insertion, and/or substitution of one or more nucleotides compared to the endogenous sequence of the double stranded target gene, e.g., the DMPK gene. In some embodiments, the one or more intended nucleotide edits comprises deletion of an array of tri-nucleotide repeats compared to the endogenous sequence of the double stranded target gene, e.g., the DMPK gene. In some embodiments, the one or more intended nucleotide edits comprises deletion of an array of CTG repeats compared to the endogenous sequence of the double stranded target gene, e.g., the DMPK gene. In some embodiments, the one or more intended nucleotide edits comprises deletion of an array of tri-nucleotide repeats, e.g., an array of CTG repeats, and insertion of one or more exogenous sequences compared to the endogenous sequence of the double stranded target gene, e.g., the DMPK gene. In some embodiments, the one or more intended nucleotide edits comprises deletion of a portion of an array of tri-nucleotide repeats, e.g., an array of CTG repeats, and optionally insertion of one or more exogenous sequences compared to the endogenous sequence of the double stranded target gene, e.g., the DMPK gene. In some embodiments, the one or more intended nucleotide edits comprises deletion of 1-3, 1-5, 1-10, 1-15, 1-20, 1-25, 1-30, 1-35, 1-40, 1-45, 1-50, 1-55, 1-60, 1-75 or more tri-nucleotide repeats compared to the endogenous sequence of the double stranded target gene, e.g., the DMPK gene. In some embodiments, the one or more intended nucleotide edits comprises deletion of 1-3, 1-5, 1-10, 1-15, 1-20, 1-25, 1-30, 1-35, 1-40, 1-45, 1-50, 1-55, 1-60, 1-75 or more tri-nucleotide repeats compared to the endogenous sequence of the double stranded target gene, e.g., the DMPK gene. In some embodiments, the one or more intended nucleotide edits comprises deletion of 5-10, 5-15, 5-20, 5-25, 5-30, 5-35, 5-40, 5-50, 5-60, 5-70, 5-80, 5-90, 5-100, 20-30, 20-40, 20-50, 20-60, 20-70, 20-80, 20-90, 20-100, 35-40, 35-50, 35-60, 35-70, 35-80, 35-90, 35-100, 50-70, 50-80, 50-90, 50-100, 50-150, 50-200, 50-250, 50-300, 50-350, 50-400, 50-450, 50-500, 50-550, 50-600, 50-650, 50-700, 50-750, 50-800, 50-850, 50-900, 50-950, 50-1000, 50-1050, 50-1100, 50-1150, 50-1200, 50-1250, 50-1300, 50-1350, 50-1400, 50-1450, 50-1500, 100-150, 100-200, 100-250, 100-300, 100-350, 100-400, 100-450, 100-500, 100-550, 100-600, 100-650, 100-700, 100-750, 100-800, 100-850, 100-900, 100-950, 100-1000, 100-1050, 100-1100, 100-1150, 100-1200, 100-1250, 100-1300, 100-1350, 100-1400, 100-1450, 100-1500, 150-200, 150-250, 150-300, 150-350, 150-400, 150-450, 150-500, 150-550, 150-600, 150-650, 150-700, 150-750, 150-800, 150-850, 150-900, 150-950, 150-1000, 150-1050, 150-1100, 150-1150, 150-1200, 150-1250, 150-1300, 150-1350, 150-1400, 150-1450, 150-1500, 200-250, 200-300, 200-350, 200-400, 200-450, 200-500, 200-550, 200-600, 200-650, 200-700, 200-750, 200-800, 200-850, 200-900, 200-950, 200-1000, 200-1050, 200-1100, 200-1150, 200-1200, 200-1250, 200-1300, 200-1350, 200-1400, 200-1450, 200-1500, 250-300, 250-350, 250-400, 250-450, 250-500, 250-550, 250-600, 250-650, 250-700, 250-750, 250-800, 250-850, 250-900, 250-950, 250-1000, 250-1050, 250-1100, 250-1150, 250-1200, 250-1250, 250-1300, 250-1350, 250-1400, 250-1450, 250-1500, 300-350, 300-400, 300-450, 300-500, 300-550, 300-600, 300-650, 300-700, 300-750, 300-800, 300-850, 300-900, 300-950, 300-1000, 300-1050, 300-1100, 300-1150, 300-1200, 300-1250, 300-1300, 300-1350, 300-1400, 300-1450, 300-1500, 400-450, 400-500, 400-550, 400-600, 400-650, 400-700, 400-750, 400-800, 400-850, 400-900, 400-950, 400-1000, 400-1050, 400-1100, 400-1150, 400-1200, 400-1250, 400-1300, 400-1350, 400-1400, 400-1450, 400-1500, 500-550, 500-600, 500-650, 500-700, 500-750, 500-800, 500-850, 500-900, 500-950, 500-1000, 500-1050, 500-1100, 500-1150, 500-1200, 500-1250, 500-1300, 500-1350, 500-1400, 500-1450, 500-1500, 600-650, 600-700, 600-750, 600-800, 600-850, 600-900, 600-950, 600-1000, 600-1050, 600-1100, 600-1150, 600-1200, 600-1250, 600-1300, 600-1350, 600-1400, 600-1450, 600-1500, 700-750, 700-800, 700-850, 700-900, 700-950, 700-1000, 700-1050, 700-1100, 700-1150, 700-1200, 700-1250, 700-1300, 700-1350, 700-1400, 700-1450, 700-1500, 800-850, 800-900, 800-950, 800-1000, 800-1050, 800-1100, 800-1150, 800-1200, 800-1250, 800-1300, 800-1350, 800-1400, 800-1450, 800-1500, 900-950, 900-1000, 900-1050, 900-1100, 900-1150, 900-1200, 900-1250, 900-1300, 900-1350, 900-1400, 900-1450, 900-1500, 1000-1050, 1000-1100, 1000-1150, 1000-1200, 1000-1250, 1000-1300, 1000-1350, 1000-1400, 1000-1450, 1000-1500, 1100-1200, 1100-1300, 1100-1400, 1100-1500, 1200-1300, 1200-1400, 1200-1500, 1300-1400, 1300-1500, or 1400-1500 tri-nucleotide repeats compared to the endogenous sequence of the double stranded target gene, e.g., the DMPK gene.

[0531] In some embodiments, the editing template is a template for an RNA-dependent DNA polymerase domain or polypeptide of the prime editor, for example, a reverse transcriptase domain. The reverse transcriptase editing template may also be referred to herein as an RT template, or RTT.

[0532] In certain embodiments, the extension arm comprises a primer binding site sequence (PBS) that can initiate target-primed DNA synthesis. In some embodiments, the PBS is complementary or substantially complementary to a free 3′ end on the edit strand of the target gene at a nick site generated by the prime editor. In some embodiments, the first PEgRNA comprises a first PBS that comprises a region of complementarity to the second strand of the double stranded target DNA or target gene. In some embodiments, the second PEgRNA comprises a second PBS that comprises a region of complementarity to the first strand of the double stranded target DNA or target gene. In some embodiments, the first PEgRNA comprises a first PBS that comprises a region of complementarity to the first spacer of the first PEgRNA. In some embodiments, the first PEgRNA comprises a first PBS that is at least partially complementary to the first spacer of the first PEgRNA. In some embodiments, the second PEgRNA comprises a second PBS that comprises a region of complementarity to the second spacer of the second PEgRNA. In some embodiments, the second PEgRNA comprises a second PBS that is at least partially complementary to the second spacer of the second PEgRNA.

[0533] In some embodiments, a PEgRNA includes only RNA nucleotides and forms an RNA polynucleotide. In some embodiments, a PEgRNA is a chimeric polynucleotide that includes both RNA and DNA nucleotides. For example, a PEgRNA can include DNA in the spacer, the gRNA core, or the extension arm. In some embodiments, a PEgRNA comprises DNA in the spacer. In some embodiments, the entire spacer of a PEgRNA is a DNA sequence. In some embodiments, the PEgRNA comprises DNA in the gRNA core, for example, in a stem region of the gRNA core. In some embodiments, the PEgRNA comprises DNA in the extension arm, for example, in the editing template. An editing template that comprises a DNA sequence may serve as a DNA synthesis template for a DNA polymerase in a prime editor, for example, a DNA-dependent DNA polymerase. Accordingly, the PEgRNA may be a chimeric polynucleotide that comprises RNA in the spacer, gRNA core, and/or the PBS sequences and DNA in the editing template.

[0534] Components of a PEgRNA may be arranged in a modular fashion. In some embodiments, the spacer, the primer binding site sequence (PBS) and the editing template, e.g., a reverse transcriptase template (RTT), can be interchangeably located in the 5′ portion of the PEgRNA, the 3′ portion of the PEgRNA, or in the middle of the gRNA core. In some embodiments, a PEgRNA comprises a PBS and an editing template sequence in 5′ to 3′ order. In some embodiments, the gRNA core of a PEgRNA of this disclosure may be located in between a spacer and an extension arm (i.e., the PBS and editing template) of the PEgRNA. In some embodiments, the gRNA core of a PEgRNA may be located at the 3′ end of a spacer. In some embodiments, the gRNA core of a PEgRNA may be located at the 5′ end of a spacer. In some embodiments, the gRNA core of a PEgRNA may be located at the 3′ end of an extension arm. In some embodiments, the gRNA core of a PEgRNA may be located at the 5′ end of an extension arm. In some embodiments, a PEgRNA comprises, from 5′ to 3′: a spacer, a gRNA core, and an extension arm. In some embodiments, a PEgRNA comprises, from 5′ to 3′: a spacer, a gRNA core, an editing template, and a PBS. In some embodiments, a PEgRNA comprises, from 5′ to 3′: an extension arm, a spacer, and a gRNA core. In some embodiments, the PEgRNA comprises, from 5′ to 3′: an editing template, a PBS, a spacer, and a gRNA core. In some embodiments, a first PEgRNA comprises a structure: 5′-[first spacer]-[first gRNA core]-[first editing template]-[first primer binding site sequence]-3′. In some embodiments, a first PEgRNA comprises a structure: 5′-[first editing template]-[first primer binding site sequence]-[first spacer]-[first gRNA core]-3′. In some embodiments, a second PEgRNA comprises a structure: 5′-[second spacer]-[second gRNA core]-[second editing template]-[second primer binding site sequence]-3′. In some embodiments, a second PEgRNA comprises a structure: 5′-[second editing template]-[second primer binding site sequence]-[second spacer]-[second gRNA core]-3′.

[0535] In some embodiments, a PEgRNA comprises a single polynucleotide molecule that comprises the spacer, the gRNA core, and the editing template. In some embodiments, a PEgRNA comprises a single polynucleotide molecule that comprises the spacer, the gRNA core, and the extension arm (i.e., a PBS and editing template). In some embodiments, a PEgRNA comprises multiple polynucleotide molecules, for example, two polynucleotide molecules. In some embodiments, a PEgRNA comprise a first polynucleotide molecule that comprises the spacer and a portion of the gRNA core, and a second polynucleotide molecule that comprises the rest of the gRNA core and the extension arm. In some embodiments, the gRNA core portion in the first polynucleotide molecule and the gRNA core portion in the second polynucleotide molecule are at least partly complementary to each other. In some embodiments, the PEgRNA may comprise a first polynucleotide comprising the spacer and a first portion of a gRNA core referred to as a crRNA. In some embodiments, the PEgRNA comprise a second polynucleotide comprising a second portion of the gRNA core and the extension arm, wherein the second portion of the gRNA core may also be referred to as a trans-activating crRNA, or tracr RNA. In some embodiments, the crRNA portion and the tracr RNA portion of the gRNA core are at least partially complementary to each other. In some embodiments, the partially complementary portions of the crRNA and the tracr RNA form a lower stem, a bulge, and an upper stem, as exemplified in FIG. 3.

[0536] In some embodiments, a first spacer comprises a region that has substantial complementarity to a first search target sequence on a first target strand, or first strand, of a double stranded target DNA, e.g., a DMPK gene. In some embodiments, the first spacer of a PEgRNA is identical or substantially identical to a protospacer sequence on the second strand of the target gene (except that the protospacer sequence comprises thymine and the spacer may comprise uracil). In some embodiments, the first spacer is at least about 70%, 75%, 80%, 85%, 90%, 95%, or 100% complementary to a first search target sequence in the target gene. In some embodiments, the first spacer is substantially complementary to the first search target sequence. In some embodiments, a second spacer comprises a region that has substantial complementarity to a second search target sequence on the second target strand, or the second strand, of a double stranded target DNA, e.g., a DMPK gene. In some embodiments, the second spacer of a PEgRNA is identical or substantially identical to a protospacer on the first strand of the target gene (except that the protospacer comprises thymine and the spacer may comprise uracil). In some embodiments, the second spacer is at least about 70%, 75%, 80%, 85%, 90%, 95%, or 100% complementary to a second search target sequence in the target gene. In some embodiments, the second spacer is substantially complementary to the second search target sequence.

[0537] In some embodiments, the length of the spacer varies from at least 10 nucleotides to 100 nucleotides. For examples, a spacer may be at least 10 nucleotides, at least 11 nucleotides, at least 12 nucleotides, at least 13 nucleotides, at least 14 nucleotides, at least 15 nucleotides, at least 16 nucleotides, at least 17 nucleotides, at least 18 nucleotides, at least 19 nucleotides, at least 20 nucleotides, at least 21 nucleotides, at least 22 nucleotides, at least 23 nucleotides, at least 24 nucleotides, at least 25 nucleotides, at least 30 nucleotides, at least 40 nucleotides, at least 50 nucleotides, at least 60 nucleotides, at least 70 nucleotides, at least 80 nucleotides, at least 90 nucleotides, at least 100 nucleotides. In some embodiments, the spacer is 16 nucleotides, 17 nucleotides, 18 nucleotides, 19 nucleotides, 20 nucleotides, 21 nucleotides, 22 nucleotides, 23 nucleotides, 24 nucleotides, or 25 nucleotides in length. In some embodiments, the spacer is from 15 nucleotides to 30 nucleotides in length, 15 to 25 nucleotides in length, 17 to 23 nucleotides in length, 18 to 22 nucleotides in length, 10 to 20 nucleotides in length, 20 to 30 nucleotides in length, 30 to 40 nucleotides in length, 40 to 50 nucleotides in length, 50 to 60 nucleotides in length, 60 to 70 nucleotides in length, 70 to 80 nucleotides in length, or 90 nucleotides to 100 nucleotides in length. In some embodiments, the spacer is 20 nucleotides in length. In some embodiments, the spacer is 17 to 18 nucleotides in length. In some embodiments, the spacer is 21 to 22 nucleotides in length.

[0538] The extension arm of a first PEgRNA may be partially complementary to the spacer of the first PEgRNA. In some embodiments, the editing template (e.g., RTT) of a first PEgRNA is partially complementary to the spacer of the first PEgRNA. In some embodiments, the editing template (e.g., RTT) and the primer binding site (PBS) of the first PEgRNA are each partially complementary to the spacer of the first PEgRNA. The extension arm of a PEgRNA may comprise a primer binding site (PBS) and an editing template (e.g., an RTT). The extension arm of a second PEgRNA may be partially complementary to the spacer of the second PEgRNA. In some embodiments, the editing template (e.g., RTT) of a second PEgRNA is partially complementary to the spacer of the second PEgRNA. In some embodiments, the editing template (e.g., RTT) and the primer binding site (PBS) of the second PEgRNA are each partially complementary to the spacer of the second PEgRNA.

[0539] An extension arm of a PEgRNA may comprise a primer binding site sequence (also referred to as a primer binding site, PBS, or PBS sequence) that hybridizes with a free 3′ end of a single stranded DNA in the target gene (e.g., the DMPK gene) generated by nicking with a prime editor. The length of the PBS sequence may vary depending on, e.g., the prime editor components, the search target sequence and other components of the PEgRNA. In some embodiments, the length of the primer binding site (PBS) varies from at least 2 nucleotides to 50 nucleotides. For examples, a primer binding site (PBS) may be at least 2 nucleotides, at least 3 nucleotides, at least 4 nucleotides, at least 5 nucleotides, at least 6 nucleotides, at least 7 nucleotides, at least 8 nucleotides, at least 9 nucleotides, at least 10 nucleotides, at least 11 nucleotides, at least 12 nucleotides, at least 13 nucleotides, at least 14 nucleotides, at least 15 nucleotides, at least 16 nucleotides, at least 17 nucleotides, at least 18 nucleotides, at least 19 nucleotides, at least 20 nucleotides, at least 30 nucleotides, at least 40 nucleotides, or at least 50 nucleotides in length. In some embodiments, the PBS is at least 4 nucleotides in length. In some embodiments, the PBS is at least 6 nucleotides in length. In some embodiments, the PBS is about 4 to 12 nucleotides, about 6 to 12 nucleotides, about 8 to 12 nucleotides, about 10 to 12 nucleotides, 4 to 14 nucleotides, about 6 to 14 nucleotides, about 8 to 14 nucleotides, about 10 to 14 nucleotides, about 12 to 14 nucleotides, 4 to 16 nucleotides, about 6 to 16 nucleotides, about 8 to 16 nucleotides, about 10 to 16 nucleotides, about 6 to 18 nucleotides, about 6 to 20 nucleotides, about 8 to 20 nucleotides, about 10 to 20 nucleotides, about 12 to 20 nucleotides, about 14 to 20 nucleotides, about 16 to 20 nucleotides, or about 18 to 20 nucleotides in length. In some embodiments, the PBS is about 7 to 15 nucleotides in length. In some embodiments, the PBS is 6, 7, 8, 9, 10, 11, 12, 13, 14, 15, 16, 17, 18, 19, or 20 nucleotides in length. In some embodiments, the PBS is 8, 9, 10, 11, 12, 13, or 14 nucleotides in length. In some embodiments, the PBS is 3 to 19 nucleotides in length. In some embodiments, the PBS is 3 to 17 nucleotides in length. In some embodiments, the PBS is about 8 to 17 nucleotides in length. In some embodiments, the PBS is 8 to 9, 8 to 10, 8 to 11, or 8 to 12 nucleotides in length.

[0540] The PBS of a first PEgRNA may be complementary or substantially complementary to a DNA sequence in the second strand of the target gene. The PBS of a second PEgRNA may be complementary or substantially complementary to a DNA sequence in the first strand of the target gene. By annealing with the edit strand at a free hydroxy group, e.g., a free 3′ end generated by prime editor nicking, a PBS may initiate synthesis of a new single stranded DNA encoded by the editing template at the nick site. In some embodiments, a PBS is at least about 70%, 75%, 80%, 85%, 90%, 95%, or 100% complementary to a region of the edit strand of the target gene (e.g., the DMPK gene). In some embodiments, a PBS is perfectly complementary, or 100% complementary, to a region of the edit strand of the target gene (e.g., the DMPK gene).

[0541] An extension arm of a PEgRNA may comprise an editing template that serves as a DNA synthesis template for the DNA polymerase in a prime editor during prime editing.

[0542] The length of an editing template may vary depending on, e.g., the prime editor components, the search target sequence and other components of the PEgRNA. In some embodiments, the editing template serves as a DNA synthesis template for a reverse transcriptase, and the editing template is referred to as a reverse transcription editing template or simply reverse transcriptase template (RTT).

[0543] In some embodiments, the editing template (e.g., RTT) is 2, 3, 4, 5, 6, 7, 8, 9, 10, 11, 12, 13, 14, 15, 16, 17, 18, 19, 20, 21, 22, 23, 24, or 25 nucleotides in length. In some embodiments, the editing template is 12, 13, 14, 15, 16, 17, 18, 19, 20, 21, 22, 23, 24, or 25 nucleotides in length. In some embodiments, the editing template is 16, 17, 18, 19, 20, 21, 22, 23, 24, 25, 26, 27, 28, 29, 30, 31, 32, 33, 34, 35, 36, 37, 38, 39, or 40 nucleotides in length. In some embodiments, the editing template comprises 2, 3, 4, 5, 6, 7, 8, 9, 10, 11, 12, 13, 14, 15, 16, 17, 18, 19, 20, 21, 22, 23, 24, 25, 30, 35, 40, 45, 50 or more nucleotides. In some embodiments, the editing template comprises about 5 to 10, 5 to 15, 5 to 20, 5 to 25, 5 to 30, 5 to 35, 5 to 40, 5 to 45, 5 to 50, 5 to 55, 5 to 60, 5 to 65, 5 to 70, 5 to 75, 5 to 80, 5 to 85, 5 to 90, 5 to 95, 5 to 100, 5 to 110, 5 to 120, 5 to 130, 5 to 140, 5 to 150, 15 to 20, 15 to 25, 15 to 30, 15 to 35, 15 to 40, 15 to 45, 15 to 50, 15 to 55, 15 to 60, 15 to 65, 15 to 70, 15 to 75, 15 to 80, 15 to 85, 15 to 90, 15 to 95, 15 to 100, 15 to 110, 15 to 120, 15 to 130, 15 to 140, 15 to 150, 25 to 30, 25 to 35, 25 to 40, 25 to 45, 25 to 50, 25 to 55, 25 to 60, 25 to 65, 25 to 70, 25 to 75, 25 to 80, 25 to 85, 25 to 90, 25 to 95, 25 to 100, 25 to 110, 25 to 120, 25 to 130, 25 to 140, 25 to 150, 35 to 40, 35 to 45, 35 to 50, 35 to 55, 35 to 60, 35 to 65, 35 to 70, 35 to 75, 35 to 80, 35 to 85, 35 to 90, 35 to 95, 35 to 100, 35 to 110, 35 to 120, 35 to 130, 35 to 140, 35 to 150, 45 to 50, 45 to 55, 45 to 60, 45 to 65, 45 to 70, 45 to 75, 45 to 80, 45 to 85, 45 to 90, 45 to 95, 45 to 100, 45 to 110, 45 to 120, 45 to 130, 45 to 140, o45 to 150, 55 to 60, 55 to 65, 55 to 70, 55 to 75, 55 to 80, 55 to 85, 55 to 90, 55 to 95, 55 to 100, 55 to 110, 55 to 120, 55 to 130, 55 to 140, 55 to 150, 65 to 70, 65 to 75, 65 to 80, 65 to 85, 65 to 90, 65 to 95, 65 to 100, 65 to 110, 65 to 120, 65 to 130, 65 to 140, 65 to 150, 75 to 80, 75 to 85, 75 to 90, 75 to 95, 75 to 100, 75 to 110, 75 to 120, 75 to 130, 75 to 140, 75 to 150, 85 to 90, 85 to 95, 85 to 100, 85 to 110, 85 to 120, 85 to 130, 85 to 140, 85 to 150, 95 to 100, 95 to 110, 95 to 120, 95 to 130, 95 to 140, 95 to 150, 105 to 110, 105 to 120, 105 to 130, 105 to 140, 105 to 150, 115 to 120, 115 to 130, 115 to 140, 115 to 150, 125 to 130, 125 to 140, 125 to 150, 135 to 140, 135 to 150, or 145 to 150 nucleotides in length.

[0544] In some embodiments, the editing template comprises 10, 11, 12, 13, 14, 15, 16, 17, 18, 19, 20, 21, 22, 23, 24 or 25 nucleotides in length. In some embodiments, the editing template comprises 30, 35, 40, 50, 60, 70, 80, 90, or 100 nucleotides in length. In some embodiments, the editing template comprises no greater than 20, 25, 30, 35, 40, 50, 60, 70, 80, 90, or 100 nucleotides in length. In some embodiments, the editing template comprises a sufficient number of nucleotides to form a sufficiently stable duplex with a sequence on the double stranded target DNA. In some embodiments, the editing template comprises at least 10 polynucleotides. In some embodiments, the editing template comprises at least 15 polynucleotides. In some embodiments, the editing template comprises at least 20 polynucleotides.

[0545] RTT's may also include sequences unrelated to the endogenous sequence. This may be done, for example, to insert a readily-identifiable sequence to permit rapid determination of successful editing, or to improve editing efficiency by controlling insert length or GC content. In some embodiments, the editing template has a GC content of about 40%. In some embodiments, the editing template has a GC content of about 50%. In some embodiments, the editing template has a GC content of about 60%. In some embodiments, the editing template has a GC content of about 70%. In some embodiments, the editing template has a GC content of about 80%.

[0546] An intended nucleotide edit in an editing template of a PEgRNA may comprise various types of alterations as compared to the target gene sequence. In some embodiments, the nucleotide edit is a single nucleotide substitution as compared to the target gene sequence. In some embodiments, the nucleotide edit is a deletion as compared to the target gene sequence. In some embodiments, the nucleotide edit is an insertion as compared to the target gene sequence. In some embodiments, the editing template comprises one to ten intended nucleotide edits as compared to the target gene sequence. In some embodiments, the editing template comprises one or more intended nucleotide edits as compared to the target gene sequence. In some embodiments, the editing template comprises two or more intended nucleotide edits as compared to the target gene sequence. In some embodiments, the editing template comprises three or more intended nucleotide edits as compared to the target gene sequence. In some embodiments, the editing template comprises four or more, five or more, or six or more intended nucleotide edits as compared to the target gene sequence. In some embodiments, the editing template comprises two single nucleotide substitutions, insertions, deletions, or any combination thereof, as compared to the target gene sequence. In some embodiments, the editing template comprises three single nucleotide substitutions, insertions, deletions, or any combination thereof, as compared to the target gene sequence. In some embodiments, the editing template comprises four, five, or six single nucleotide substitutions, insertions, deletions, or any combination thereof, as compared to the target gene sequence. In some embodiments, a nucleotide substitution comprises an adenine (A)-to-thymine (T) substitution. In some embodiments, a nucleotide substitution comprises an A-to-guanine (G) substitution. In some embodiments, a nucleotide substitution comprises an A-to-cytosine (C) substitution. In some embodiments, a nucleotide substitution comprises a T-A substitution. In some embodiments, a nucleotide substitution comprises a T-G substitution. In some embodiments, a nucleotide substitution comprises a T-C substitution. In some embodiments, a nucleotide substitution comprises a G-to-A substitution. In some embodiments, a nucleotide substitution comprises a G-to-T substitution. In some embodiments, a nucleotide substitution comprises a G-to-C substitution. In some embodiments, a nucleotide substitution comprises a C-to-A substitution. In some embodiments, a nucleotide substitution comprises a C-to-T substitution. In some embodiments, a nucleotide substitution comprises a C-to-G substitution.

[0547] In some embodiments, a nucleotide insertion is at least 5 nucleotides, at least 6 nucleotides, at least 7 nucleotides, at least 8 nucleotides, at least 9 nucleotides, at least 10 nucleotides, at least 11 nucleotides, at least 12 nucleotides, at least 13 nucleotides, at least 14 nucleotides, at least 15 nucleotides, at least 16 nucleotides, at least 17 nucleotides, at least 18 nucleotides, at least 19 nucleotides, or at least 20 nucleotides in length. In some embodiments, a nucleotide insertion is from 1 to 2 nucleotides, from 1 to 3 nucleotides, from 1 to 4 nucleotides, from 1 to 5 nucleotides, form 2 to 5 nucleotides, from 3 to 5 nucleotides, from 3 to 6 nucleotides, from 3 to 8 nucleotides, from 4 to 9 nucleotides, from 5 to 10 nucleotides, from 6 to 11 nucleotides, from 7 to 12 nucleotides, from 8 to 13 nucleotides, from 9 to 14 nucleotides, from 10 to 15 nucleotides, from 11 to 16 nucleotides, from 12 to 17 nucleotides, from 13 to 18 nucleotides, from 14 to 19 nucleotides, from 15 to 20 nucleotides in length. In some embodiments, a nucleotide insertion is a single nucleotide insertion. In some embodiments, a nucleotide insertion comprises insertion of two nucleotides.

[0548] The editing template of a PEgRNA may comprise one or more intended nucleotide edits, compared to the DMPK gene to be edited. Position of the intended nucleotide edit(s) relevant to other components of the PEgRNA, or to particular nucleotides (e.g., mutations) in the DMPK target gene may vary. In some embodiments, the nucleotide edit is in a region of the PEgRNA corresponding to or homologous to the protospacer sequence. In some embodiments, the nucleotide edit is in a region of the PEgRNA corresponding to a region of the DMPK gene outside of the protospacer sequence.

[0549] In some embodiments, incorporation of the one or more intended nucleotide edits results in deletion of the inter-nick duplex (IND) from the double stranded target DNA, e.g., the DMPK gene. In some embodiments, the IND comprises a mutation compared to a wild type gene sequence, e.g., a wild type DMPK gene. In some embodiments, the IND comprises a mutation in the 3′ untranslated region of the DMPK gene as compared to a wild type DMPK gene. In some embodiments, the mutation is expansion of the number of CTG repeats compared to a wild type DMPK gene. In some embodiments, the IND is located between positions corresponding to positions 45770205 and 45770207 of human chromosome 19 as set forth in human genome research consortium human build 38 (GRCh38). In some embodiments, the IND is located between positions corresponding to positions 45770105 and 45770307 of human chromosome 19 as set forth in human genome research consortium human build 38 (GRCh38). In some embodiments, the IND is located between positions corresponding to positions 45770005 and 45770407 of human chromosome 19 as set forth in human genome research consortium human build 38 (GRCh38). In some embodiments, the IND is located between positions corresponding to positions 45776905 and 45770507 of human chromosome 19 as set forth in human genome research consortium human build 38 (GRCh38)

[0550] In some embodiments, the editing template comprises an adenine at the first nucleobase position (e.g., for a PEgRNA following 5′-spacer-gRNA core-RTT-PBS-3′ orientation, the 5′ most nucleobase is the “first base”). In some embodiments, the editing template comprises a guanine at the first nucleobase position (e.g., for a PEgRNA following 5′-spacer-gRNA core-RTT-PBS-3′ orientation, the 5′ most nucleobase is the “first base”). In some embodiments, the editing template comprises an uracil at the first nucleobase position (e.g., for a PEgRNA following 5′-spacer-gRNA core-RTT-PBS-3′ orientation, the 5′ most nucleobase is the “first base”). In some embodiments, the editing template comprises a cytosine at the first nucleobase position (e.g., for a PEgRNA following 5′-spacer-gRNA core-RTT-PBS-3′ orientation, the 5′ most nucleobase is the “first base”). In some embodiments, the editing template does not comprise a cytosine at the first nucleobase position (e.g., for a PEgRNA following 5′-spacer-gRNA core-RTT-PBS-3′ orientation, the 5′ most nucleobase is the “first base”).

[0551] A guide RNA core (also referred to herein as the gRNA core, gRNA scaffold, or gRNA backbone sequence) of a PEgRNA may contain a polynucleotide sequence that binds to a DNA binding domain (e.g., Cas9) of a prime editor. The gRNA core may interact with a prime editor as described herein, for example, by association with a DNA binding domain, such as a Cas9 nickase of the prime editor.

[0552] One of skill in the art will recognize that different prime editors having different DNA binding domains from different DNA binding proteins may require different gRNA core sequences specific to the DNA binding protein. In some embodiments, the gRNA core is capable of binding to a Cas9-based prime editor. In some embodiments, the gRNA core is capable of binding to a Cpf1-based prime editor. In some embodiments, the gRNA core is capable of binding to a Cas12b-based prime editor.

[0553] In some embodiments, the gRNA core comprises regions and secondary structures involved in binding with specific CRISPR Cas proteins. For example, in a Cas9 based prime editing system, the gRNA core of a PEgRNA may comprise one or more regions of a base paired “lower stem” adjacent to the spacer and a base paired “upper stem” following the lower stem, where the lower stem and upper stem may be connected by a “bulge” comprising unpaired RNAs. The gRNA core may further comprise a “nexus” distal from the spacer, followed by a hairpin structure, e.g., at the 3′ end, as exemplified in FIG. 3. In some embodiments, the gRNA core comprises modified nucleotides as compared to a wild type gRNA core in the lower stem, upper stem, and/or the hairpin. For example, nucleotides in the lower stem, upper stem, and/or the hairpin regions may be modified, deleted, or replaced. In some embodiments, RNA nucleotides in the lower stem, upper stem, and/or the hairpin regions may be replaced with one or more DNA sequences. In some embodiments, the gRNA core comprises unmodified or wild type RNA sequences in the nexus and/or the bulge regions. In some embodiments, the gRNA core does not include long stretches of A-T pairs, for example, a GUUUU-AAAAC pairing element. In some embodiments, the gRNA core is capable of binding to a SpCas9, and comprises the sequence: GUUUUAGAGCUAGAAAUAGCAAGUUAAAAUAAGGCUAGUCCGUUAUCAACUUGA AAAAGUGGCACCGAGUCGGUGC (SEQ ID NO: 3641); GUUUGAGAGCUAGAAAUAGCAAGUUUAAAUAAGGCUAGUCCGUUAUCAACUUGA AAAAGUGGGACCGAGUCGGUCC (SEQ ID NO: 3642), or GUUUAAGAGCUAUGCUGGAAACAGCAUAGCAAGUUUAAAUAAGGCUAGUCCGUU AUCAACUUGAAAAAGUGGCACCGAGUCGGUGC (SEQ ID NO: 3643). In some embodiments, the gRNA core comprises the sequence GUUUUAGAGCUAGAAAUAGCAAGUUAAAAUAAGGCUAGUCCGUUAUCAACUUGA AAAAGUGGCACCGAGUCGGUGC (SEQ ID NO: 3641). In some embodiments, the gRNA core is capable of binding to a SaCas9 and comprises the sequence GTTTTAGTACTCTGGAAACAGAATCTACTAAAACAAGGCAAAATGCCGTGT TTATCTCGTCAACTTGTTGGCGAGA (SEQ ID NO: 3644)). In some embodiments, the gRNA core is capable of binding to a SluCas9 and comprises the sequence GTTTTAGTACTCTGGAAACAGAATCTACTGAAACAAGACAATATGTCGTGTTTATCC CATCAATTTATTGGTGGGA (SEQ ID NO: 3645). Any gRNA core sequences known in the art are also contemplated in the prime editing compositions described herein. In some embodiments, one or more nucleotides in the gRNA core is DNA.

[0554] In some embodiments, a PEgRNA is produced by transcription from a template nucleotide, for example, a template plasmid. In some embodiments, a polynucleotide encoding the PEgRNA is appended with one or more additional nucleotides that improves PEgRNA expression, e.g., expression from a plasmid that encodes the PEgRNA or ngRNA. In some embodiments, a polynucleotide encoding a PEgRNA is appended with one or more additional nucleotides at the 5′ end or at the 3′ end. In some embodiments, the polynucleotide encoding the PEgRNA is appended with a guanine at the 5′ end, for example, if the first nucleotide at the 5′ end of the spacer is not a guanine. In some embodiments, a polynucleotide encoding the PEgRNA is appended with nucleotide sequence CACC at the 5′ end. In some embodiments, the polynucleotide encoding the PEgRNA is appended with additional nucleotide sequence TTTTTT, TTTTTTT, TTTTT, or TTTT at the 3′ end. In some embodiments, the PEgRNA comprises the appended nucleotides from the transcription template. In some embodiments, the PEgRNA or ngRNA further comprises one or more nucleotides at the 5′ end or the 3′ end in addition to spacer, PBS, and RTT sequences. in some embodiments, the PEgRNA or ngRNA further comprises a guanine at the 5′ end, for example, when the first nucleotide at the 5′ end of the spacer is not a guanine. In some embodiments, the PEgRNA or ngRNA further comprises nucleotide sequence CACC at the 5′ end. In some embodiments, the PEgRNA or ngRNA further comprises nucleotide sequence UUUUUUU, UUUUUU, UUUUU, or UUUU at the 3′ end.

[0555] A PEgRNA may also comprise optional modifiers, e.g., 3′ end modifier region and/or an 5′ end modifier region. In some embodiments, a PEgRNA comprises at least one nucleotide that is not part of a spacer, a gRNA core, or an extension arm. The optional sequence modifiers could be positioned within or between any of the other regions shown, and not limited to being located at the 3′ and 5′ ends. In certain embodiments, the PEgRNA comprises secondary RNA structure, such as, but not limited to, aptamers, hairpins, stem/loops, toeloops, and/or RNA-binding protein recruitment domains (e.g., the MS2 aptamer which recruits and binds to the MS2 coat protein (MS2cp)). In some embodiments, a PEgRNA comprises a short stretch of uracil at the 5′ end or the 3′ end. For example, in some embodiments, a PEgRNA comprising a 3′ extension arm comprises a “UUU” sequence at the 3′ end of the extension arm. In some embodiments, a PEgRNA comprises a toeloop sequence at the 3′ end. In some embodiments, the PEgRNA comprises a 3′ extension arm and a toeloop sequence at the 3′ end of the extension arm. In some embodiments, the PEgRNA comprises a 5′ extension arm and a toeloop sequence at the 5′ end of the extension arm. In some embodiments, the PEgRNA comprises a toeloop element having the sequence 5′-GAAANNNNN-3′, wherein N is any nucleobase. In some embodiments, the secondary RNA structure is positioned within the spacer. In some embodiments, the secondary structure is positioned within the extension arm. In some embodiments, the secondary structure is positioned within the gRNA core. In some embodiments, the secondary structure is positioned between the spacer and the gRNA core, between the gRNA core and the extension arm, or between the spacer and the extension arm. In some embodiments, the secondary structure is positioned between the PBS and the editing template. In some embodiments the secondary structure is positioned at the 3′ end or at the 5′ end of the PEgRNA. In some embodiments, the PEgRNA comprises a transcriptional termination signal at the 3′ end of the PEgRNA. In some embodiments, a PEgRNA comprises up to 50 nucleotides, up to 40 nucleotides, up to 30 nucleotides, up to 20 nucleotides, or up to 10 nucleotides of optional sequence modifiers at either or both of the 3′ and 5′ ends of the PEgRNA. In addition to secondary RNA structures, the PEgRNA may comprise a chemical linker or a poly(N) linker or tail, where “N” can be any nucleobase. In some embodiments, the chemical linker may function to prevent reverse transcription of the gRNA core.

[0556] A PEgRNA of this disclosure, in some embodiments, may include modified nucleotides, e.g., chemically modified DNA or RNA nucleobases, and may include one or more nucleobase analogs (e.g., modifications which might add functionality, such as temperature resilience). In some embodiments, PEgRNAs as described herein may be chemically modified. The phrase “chemical modifications,” as used herein, can include modifications which introduce chemistries which differ from those seen in naturally occurring DNA or RNAs, for example, covalent modifications such as the introduction of modified nucleotides, (e.g., nucleotide analogs, or the inclusion of pendant groups which are not naturally found in DNA or RNA molecules).

[0557] In some embodiments, the PEgRNAs provided in this disclosure may have undergone a chemical or biological modifications. Modifications may be made at any position within a PEgRNA, and may include modification to a nucleobase or to a phosphate backbone of the PEgRNA. In some embodiments, chemical modifications can be structure guided modifications. In some embodiments, a chemical modification is at the 5′ end and/or the 3′ end of a PEgRNA. In some embodiments, a chemical modification may be within the spacer, the extension arm, the editing template sequence, or the primer binding site of a PEgRNA. In some embodiments, a chemical modification may be within the spacer or the gRNA core of a PEgRNA. In some embodiments, a chemical modification may be within the 3′ most nucleotides of a PEgRNA. In some embodiments, a chemical modification may be within the 3′ most end of a PEgRNA. In some embodiments, a chemical modification may be within the 5′ most end of a PEgRNA. In some embodiments, a PEgRNA comprises 1, 2, 3, 4, 5, 6, 7, 8, 9, 10 or more chemically modified nucleotides at the 3′ end. In some embodiments, a PEgRNA comprises 1, 2, 3, 4, 5, 6, 7, 8, 9, 10 or more chemically modified nucleotides at the 5′ end. In some embodiments, a PEgRNA comprises 1, 2, 3, 4, or 5 or more chemically modified nucleotides at the 3′ end. In some embodiments, a PEgRNA comprises 1, 2, 3, 4, or 5 or more chemically modified nucleotides at the 5′ end. In some embodiments, a PEgRNA comprises 1, 2, or 3 or more chemically modified nucleotides at the 3′ end. In some embodiments, a PEgRNA comprises 1, 2, or 3 or more chemically modified nucleotides at the 5′ end.

[0558] In some embodiments, a PEgRNA comprises 1, 2, 3, 4, 5, 6, 7, 8, 9, 10 or more contiguous chemically modified nucleotides at the 3′ end. In some embodiments, a PEgRNA comprises 1, 2, 3, 4, 5, 6, 7, 8, 9, 10 or more contiguous chemically modified nucleotides at the 5′ end. In some embodiments, a PEgRNA comprises 1, 2, 3, 4, or 5 contiguous chemically modified nucleotides at the 3′ end. In some embodiments, a PEgRNA comprises 1, 2, 3, 4, or 5 contiguous chemically modified nucleotides at the 5′ end. In some embodiments, a PEgRNA comprises 1, 2, or 3 contiguous chemically modified nucleotides at the 3′ end. In some embodiments, a PEgRNA comprises 1, 2, or 3 contiguous chemically modified nucleotides at the 5′ end. In some embodiments, a PEgRNA comprises 3 contiguous chemically modified nucleotides at the 3′ end.

[0559] In some embodiments, a PEgRNA comprises 1, 2, 3, 4, 5, or more chemically modified nucleotides near the 3′ end. In some embodiments, a PEgRNA comprises 3 contiguous chemically modified nucleotides at the 3′ end. In some embodiments, a PEgRNA comprises 3 contiguous chemically modified nucleotides at the 5′ end. In some embodiments, a PEgRNA comprises 1, 2, 3, 4, 5, or more chemically modified nucleotides near the 3′ end. In some embodiments, a PEgRNA comprises 1, 2, 3, 4, 5, or more contiguous chemically modified nucleotides near the 3′ end. In some embodiments, a PEgRNA comprises 1, 2, 3, 4, 5, or more chemically modified nucleotides near the 3′ end, where the 3′ most nucleotide is not modified, and the 1, 2, 3, 4, 5, or more chemically modified nucleotides precede the 3′ most nucleotide in a 5′-to-3′ order. In some embodiments, a PEgRNA comprises 1, 2, 3, 4, 5, 6, 7, 8, 9, 10, 11, 12, 13, 14, 15, 16, 17, 18, 19, 20, 21, 22, 23, 24, 25, 26, 27, 28, 29, 30, 31, 32, 33, 34, 35 or more chemically modified nucleotides near the 3′ end, where the 3′ most nucleotide is not modified, and the 1, 2, 3, 4, 5, 6, 7, 8, 9, 10, 11, 12, 13, 14, 15, 16, 17, 18, 19, 20, 21, 22, 23, 24, 25, 26, 27, 28, 29, 30, 31, 32, 33, 34, 35 or more chemically modified nucleotides precede the 3′ most nucleotide in a 5′-to-3′ order.

[0560] In some embodiments, a PEgRNA comprises one or more chemically modified nucleotides in the gRNA core. In some embodiments, the gRNA core of a PEgRNA may comprise one or more regions of a base paired lower stem, a base paired upper stem, where the lower stem and upper stem may be connected by a bulge comprising unpaired RNAs. The gRNA core may further comprise a nexus distal from the spacer. In some embodiments, the gRNA core comprises one or more chemically modified nucleotides in the lower stem, upper stem, and/or the hairpin regions. In some embodiments, all of the nucleotides in the lower stem, upper stem, and/or the hairpin regions are chemically modified.

[0561] A chemical modification to a PEgRNA can comprise a 2′-O-thionocarbamate-protected nucleoside phosphoramidite, a 2′-O-methyl (M), a 2′-O-methyl 3′phosphorothioate (MS), or a 2′-O-methyl 3′thioPACE (MSP), or any combination thereof. In some embodiments, a chemically modified PEgRNA can comprise a ′-O-methyl (M) RNA, a 2′-O-methyl 3′phosphorothioate (MS) RNA, a 2′-O-methyl 3′thioPACE (MSP) RNA, a 2′-F RNA, a phosphorothioate bond modification, any other chemical modifications known in the art, or any combination thereof. A chemical modification may also include, for example, the incorporation of non-nucleotide linkages or modified nucleotides into the PEgRNA (e.g., modifications to one or both of the 3′ and 5′ ends of a guide RNA molecule). Such modifications can include the addition of bases to an RNA sequence, complexing the RNA with an agent (e.g., a protein or a complementary nucleic acid molecule), and inclusion of elements which change the structure of an RNA molecule (e.g., which form secondary structures).

### Prime Editing Compositions

[0562] Disclosed herein, in some embodiments, are compositions, systems, and methods using a prime editing composition. The term “prime editing composition” or “prime editing system” refers to compositions involved in the method of prime editing as described herein. A prime editing composition may include a prime editor, e.g., a prime editor fusion protein, and a PEgRNA. A prime editing composition may further comprise additional elements. Components of a prime editing composition may be combined to form a complex for prime editing, or may be kept separately, e.g., for administration purposes.

[0563] In some embodiments, a prime editing composition comprises a first prime editing guide RNA (PEgRNA), a second PEgRNA, and a prime editor. In some embodiments, a prime editing composition comprises a first prime editing guide RNA (PEgRNA), a second PEgRNA, and a prime editor fusion protein complexed with the first PEgRNA and a prime editor fusion protein complexed with the second PEgRNA. In some embodiments, the prime editor fusion protein complexed with the first PEgRNA and the prime editor fusion protein complexed with the second PEgRNA are the identical prime editor fusion protein. In some embodiments, the prime editor fusion protein complexed with the first PEgRNA and the prime editor fusion protein complexed with the second PEgRNA are different prime editor fusion proteins.

[0564] In some embodiments, a prime editing composition comprises a first prime editing guide RNA (PEgRNA), a second PEgRNA, and a prime editor comprising a DNA binding domain and a DNA polymerase domain associated with each other through the first PEgRNA and/or the second PEgRNA. For example, the prime editing composition may comprise a prime editor comprising a DNA binding domain and a DNA polymerase domain linked to each other by an RNA-protein recruitment aptamer RNA sequence, which is linked to either or both of the first and second PEgRNAs. In some embodiments, the prime editing composition comprises a first PEgRNA, a second PEgRNA, and a prime editor comprising a DNA binding domain and a DNA polymerase domain, wherein the prime editor for both the first PEgRNA and the second PEgRNA are the same. In some embodiments, the prime editing composition comprises a first PEgRNA, a second PEgRNA, and a prime editor comprising a DNA binding domain and a DNA polymerase domain, wherein the prime editor for both the first PEgRNA and the second PEgRNA are different.

[0565] In some embodiments, a prime editing composition comprises a first PEgRNA, a second PEgRNA, and a polynucleotide, a polynucleotide construct, or a vector that encodes a prime editor fusion protein. In some embodiments, a prime editing composition comprises a first PEgRNA, a second PEgRNA, and one or more polynucleotides, one or more polynucleotide constructs, or one or more vectors that encode a prime editor comprising a DNA binding domain and a DNA polymerase domain. In some embodiments, a prime editing composition comprises a first PEgRNA, a second PEgRNA, and a polynucleotide, a polynucleotide construct, or a vector that encodes a prime editor fusion protein. In some embodiments, a prime editing composition comprises multiple polynucleotides, polynucleotide constructs, or vectors, each of which encodes one or more prime editing composition components. In some embodiments, the first PEgRNA and/or the second PEgRNA of a prime editing composition is associated with the DNA binding domain, e.g., a Cas9 nickase, of the prime editor. In some embodiments, the first PEgRNA and/or the second PEgRNA of a prime editing composition complexes with the DNA binding domain of a prime editor and directs the prime editor to the double stranded target DNA.

[0566] In some embodiments, a prime editing composition comprises one or more polynucleotides that encode prime editor components and/or the first PEgRNA and/or the second PEgRNAs. In some embodiments, a prime editing composition comprises a polynucleotide encoding a fusion protein comprising a DNA binding domain and a DNA polymerase domain. In some embodiments, a prime editing composition comprises (i) a polynucleotide encoding a fusion protein comprising a DNA binding domain and a DNA polymerase domain, (ii) a first PEgRNA or a polynucleotide encoding the first PEgRNA, and (iii) a second PEgRNA or a polynucleotide encoding the second PEgRNA. In some embodiments, a prime editing composition consists of (i) a polynucleotide encoding a fusion protein comprising a DNA binding domain and a DNA polymerase domain, (ii) a first PEgRNA or a polynucleotide encoding the first PEgRNA, and (iii) a second PEgRNA or a polynucleotide encoding the second PEgRNA. In some embodiments, a prime editing composition comprises (i) a polynucleotide encoding a DNA binding domain of a prime editor, e.g., a Cas9 nickase, (ii) a polynucleotide encoding a DNA polymerase domain of a prime editor, e.g., a reverse transcriptase, (iii) a first PEgRNA or a polynucleotide encoding the first PEgRNA, and (iv) a second PEgRNA or a polynucleotide encoding the second PEgRNA. In some embodiments, a prime editing composition consists of (i) a polynucleotide encoding a DNA binding domain of a prime editor, e.g., a Cas9 nickase, (ii) a polynucleotide encoding a DNA polymerase domain of a prime editor, e.g., a reverse transcriptase, (iii) a first PEgRNA or a polynucleotide encoding the first PEgRNA, and (iv) a second PEgRNA or a polynucleotide encoding the second PEgRNA.

[0567] In some embodiments, the polynucleotide encoding the DNA binding domain or the polynucleotide encoding the DNA polymerase domain further encodes an additional polypeptide domain, e.g., an RNA-protein recruitment domain, such as a MS2 coat protein domain. In some embodiments, a prime editing composition comprises (i) a polynucleotide encoding a N-terminal half of a prime editor fusion protein and an intein-N and (ii) a polynucleotide encoding a C-terminal half of a prime editor fusion protein and an intein-C. In some embodiments, a prime editing composition comprises (i) a polynucleotide encoding a N-terminal half of a prime editor fusion protein and an intein-N (ii) a polynucleotide encoding a C-terminal half of a prime editor fusion protein and an intein-C, (iii) a first PEgRNA or a polynucleotide encoding the first PEgRNA, and (iv) a second PEgRNA or a polynucleotide encoding the second PEgRNA. In some embodiments, a prime editing composition comprises (i) a polynucleotide encoding a N-terminal portion of a DNA binding domain and an intein-N, (ii) a polynucleotide encoding a C-terminal portion of the DNA binding domain, an intein-C, and a DNA polymerase domain. In some embodiments, the DNA binding domain is a Cas protein domain, e.g., a Cas9 nickase. In some embodiments, the prime editing composition comprises (i) a polynucleotide encoding a N-terminal portion of a DNA binding domain and an intein-N, (ii) a polynucleotide encoding a C-terminal portion of the DNA binding domain, an intein-C, and a DNA polymerase domain, (iii) a first PEgRNA or a polynucleotide encoding the first PEgRNA, and (iv) a second PEgRNA or a polynucleotide encoding the second PEgRNA.

[0568] The editing template of the first PEgRNA (the “first editing template”) and the editing template of the second PEgRNA (the “second editing template”) of a prime editing system may or may not have sequence complementarity to each other. In some embodiments, the first editing template has a region of complementarity or substantial complementarity to the second editing template. In some embodiments, the region of complementarity or substantial complementarity to the second editing template is 2, 3, 4, 5, 6, 7, 8, 9, 10, 11, 12, 13, 14, 15, 16, 17, 18, 19, 20, 21, 22, 23, 24, 25, 30, 35, 40, 45, 50 or more nucleotides in length. In some embodiments, the region of complementarity or substantial complementarity to the second editing template is about 5 to 10, 5 to 15, 5 to 20, 5 to 25, 5 to 30, 5 to 35, 5 to 40, 5 to 45, 5 to 50, 5 to 55, 5 to 60, 5 to 65, 5 to 70, 5 to 75, 5 to 80, 5 to 85, 5 to 90, 5 to 95, 5 to 100, 5 to 110, 5 to 120, 5 to 130, 5 to 140, 5 to 150, 15 to 20, 15 to 25, 15 to 30, 15 to 35, 15 to 40, 15 to 45, 15 to 50, 15 to 55, 15 to 60, 15 to 65, 15 to 70, 15 to 75, 15 to 80, 15 to 85, 15 to 90, 15 to 95, 15 to 100, 15 to 110, 15 to 120, 15 to 130, 15 to 140, 15 to 150, 25 to 30, 25 to 35, 25 to 40, 25 to 45, 25 to 50, 25 to 55, 25 to 60, 25 to 65, 25 to 70, 25 to 75, 25 to 80, 25 to 85, 25 to 90, 25 to 95, 25 to 100, 25 to 110, 25 to 120, 25 to 130, 25 to 140, 25 to 150, 35 to 40, 35 to 45, 35 to 50, 35 to 55, 35 to 60, 35 to 65, 35 to 70, 35 to 75, 35 to 80, 35 to 85, 35 to 90, 35 to 95, 35 to 100, 35 to 110, 35 to 120, 35 to 130, 35 to 140, 35 to 150, 45 to 50, 45 to 55, 45 to 60, 45 to 65, 45 to 70, 45 to 75, 45 to 80, 45 to 85, 45 to 90, 45 to 95, 45 to 100, 45 to 110, 45 to 120, 45 to 130, 45 to 140, o45 to 150, 55 to 60, 55 to 65, 55 to 70, 55 to 75, 55 to 80, 55 to 85, 55 to 90, 55 to 95, 55 to 100, 55 to 110, 55 to 120, 55 to 130, 55 to 140, 55 to 150, 65 to 70, 65 to 75, 65 to 80, 65 to 85, 65 to 90, 65 to 95, 65 to 100, 65 to 110, 65 to 120, 65 to 130, 65 to 140, 65 to 150, 75 to 80, 75 to 85, 75 to 90, 75 to 95, 75 to 100, 75 to 110, 75 to 120, 75 to 130, 75 to 140, 75 to 150, 85 to 90, 85 to 95, 85 to 100, 85 to 110, 85 to 120, 85 to 130, 85 to 140, 85 to 150, 95 to 100, 95 to 110, 95 to 120, 95 to 130, 95 to 140, 95 to 150, 105 to 110, 105 to 120, 105 to 130, 105 to 140, 105 to 150, 115 to 120, 115 to 130, 115 to 140, 115 to 150, 125 to 130, 125 to 140, 125 to 150, 135 to 140, 135 to 150, or 145 to 150 nucleotides in length. In some embodiments, the region of complementarity or substantial complementarity to the second editing template is 10, 11, 12, 13, 14, 15, 16, 17, 18, 19, 20, 21, 22, 23, 24 or 25 nucleotides in length. In some embodiments, the region of complementarity or substantial complementarity to the second editing template is 30, 35, 40, 50, 60, 70, 80, 90, or 100 nucleotides in length. In some embodiments, the region of complementarity or substantial complementarity to the second editing template is at most 20, 25, 30, 35, 40, 50, 60, 70, 80, 90, or 100 nucleotides in length. In some embodiments, the region of complementarity or substantial complementarity to the second editing template is at least 10 nucleotides in length. In some embodiments, the region of complementarity or substantial complementarity to the second editing template is at least 15 nucleotides in length. In some embodiments, the region of complementarity or substantial complementarity to the second editing template is at least 20 nucleotides in length.

[0569] In some embodiments, the first editing template has a region of complementarity to the second editing template and does not have a region of complementarity or substantial complementarity to the target double stranded DNA sequence. In some embodiments, the second editing template has a region of complementarity to the first editing template and does not have a region of complementarity or substantial complementarity to the target double stranded DNA sequence.

[0570] In some embodiments, the first editing template comprises a region of complementarity or substantial complementarity to the target double stranded DNA sequence. In some embodiments, the first editing template has a region of complementarity or substantial complementarity to the second editing template and has a region of complementarity or substantial complementarity to the target double stranded DNA sequence.

[0571] In some embodiments, the second editing template comprises a region of complementarity or substantial complementarity to the target double stranded DNA sequence. In some embodiments, the second editing template has a region of complementarity to the first editing template and has a region of complementarity or substantial complementarity to the target double stranded DNA sequence.

[0572] The region of complementarity or substantial complementarity of the first editing template to the double stranded target DNA sequence may or may not have the same length as the region of complementarity or substantial complementarity of the second editing template to the double stranded target DNA sequence.

[0573] In some embodiments, the region of complementarity or substantial complementarity of the first editing template to the target double stranded DNA sequence is about 5 to 10, 5 to 15, 5 to 20, 5 to 25, 5 to 30, 5 to 35, 5 to 40, 5 to 45, 5 to 50, 5 to 55, 5 to 60, 5 to 65, 5 to 70, 5 to 75, 5 to 80, 5 to 85, 5 to 90, 5 to 95, 5 to 100, 5 to 110, 5 to 120, 5 to 130, 5 to 140, 5 to 150, 5 to 175, 5 to 200, 5 to 225, 5 to 250, 5 to 275, 5 to 300, 5 to 325, 5 to 350, 5 to 375, 5 to 400, 5 to 425, 5 to 450, 5 to 475, 5 to 500, 10 to 15, 10 to 20, 10 to 25, 10 to 30, 10 to 35, 10 to 40, 10 to 45, 10 to 50, 10 to 55, 10 to 60, 10 to 65, 10 to 70, 10 to 75, 10 to 80, 10 to 85, 10 to 90, 10 to 95, 10 to 100, 10 to 110, 10 to 120, 10 to 130, 10 to 140, 10 to 150, 10 to 175, 10 to 200, 10 to 225, 10 to 250, 10 to 275, 10 to 300, 10 to 325, 10 to 350, 10 to 375, 10 to 400, 10 to 425, 10 to 450, 10 to 475, 10 to 500, 15 to 20, 15 to 25, 15 to 30, 15 to 35, 15 to 40, 15 to 45, 15 to 50, 15 to 55, 15 to 60, 15 to 65, 15 to 70, 15 to 75, 15 to 80, 15 to 85, 15 to 90, 15 to 95, 15 to 100, 15 to 110, 15 to 120, 15 to 130, 15 to 140, 15 to 150, 15 to 175, 15 to 200, 15 to 225, 15 to 250, 15 to 275, 15 to 300, 15 to 325, 15 to 350, 15 to 375, 15 to 400, 15 to 425, 15 to 450, 15 to 475, 15 to 500, 20 to 25, 20 to 30, 20 to 35, 20 to 40, 20 to 45, 20 to 50, 20 to 55, 20 to 60, 20 to 65, 20 to 70, 20 to 75, 20 to 80, 20 to 85, 20 to 90, 20 to 95, 20 to 100, 20 to 110, 20 to 120, 20 to 130, 20 to 140, 20 to 150, 20 to 175, 20 to 200, 20 to 225, 20 to 250, 20 to 275, 20 to 300, 20 to 325, 20 to 350, 20 to 375, 20 to 400, 20 to 425, 20 to 450, 20 to 475, 20 to 500, 30 to 35, 30 to 40, 30 to 45, 30 to 50, 30 to 55, 30 to 60, 30 to 65, 30 to 70, 30 to 75, 30 to 80, 30 to 85, 30 to 90, 30 to 95, 30 to 100, 30 to 110, 30 to 120, 30 to 130, 30 to 140, 30 to 150, 30 to 175, 30 to 200, 30 to 225, 30 to 250, 30 to 275, 30 to 300, 30 to 325, 30 to 350, 30 to 375, 30 to 400, 30 to 425, 30 to 450, 30 to 475, 30 to 500, 40 to 45, 40 to 50, 40 to 55, 40 to 60, 40 to 65, 40 to 70, 40 to 75, 40 to 80, 40 to 85, 40 to 90, 40 to 95, 40 to 100, 40 to 110, 40 to 120, 40 to 130, 40 to 140, 40 to 150, 40 to 175, 40 to 200, 40 to 225, 40 to 250, 40 to 275, 40 to 300, 40 to 325, 40 to 350, 40 to 375, 40 to 400, 40 to 425, 40 to 450, 40 to 475, 40 to 500, 50 to 55, 50 to 60, 50 to 65, 50 to 70, 50 to 75, 50 to 80, 50 to 85, 50 to 90, 50 to 95, 50 to 100, 50 to 110, 50 to 120, 50 to 130, 50 to 140, 50 to 150, 50 to 175, 50 to 200, 50 to 225, 50 to 250, 50 to 275, 50 to 300, 50 to 325, 50 to 350, 50 to 375, 50 to 400, 50 to 425, 50 to 450, 50 to 475, 50 to 500, 75 to 80, 75 to 85, 75 to 90, 75 to 95, 75 to 100, 75 to 110, 75 to 120, 75 to 130, 75 to 140, 75 to 150, 75 to 175, 75 to 200, 75 to 225, 75 to 250, 75 to 275, 75 to 300, 75 to 325, 75 to 350, 75 to 375, 75 to 400, 75 to 425, 75 to 450, 75 to 475, 75 to 500, 100 to 110, 100 to 120, 100 to 130, 100 to 140, 100 to 150, 100 to 175, 100 to 200, 100 to 225, 100 to 250, 100 to 275, 100 to 300, 100 to 325, 100 to 350, 100 to 375, 100 to 400, 100 to 425, 100 to 450, 100 to 475, 100 to 500, 125 to 150, 125 to 175, 125 to 200, 125 to 225, 125 to 250, 125 to 275, 125 to 300, 125 to 325, 125 to 350, 125 to 375, 125 to 400, 125 to 425, 125 to 450, 125 to 475, 125 to 500, 150 to 175, 150 to 200, 150 to 225, 150 to 250, 150 to 275, 150 to 300, 150 to 325, 150 to 350, 150 to 375, 150 to 400, 150 to 425, 150 to 450, 150 to 475, 150 to 500, 175 to 200, 175 to 225, 175 to 250, 175 to 275, 175 to 300, 175 to 325, 175 to 350, 175 to 375, 175 to 400, 175 to 425, 175 to 450, 175 to 475, 175 to 500, 200 to 250, 200 to 275, 200 to 300, 200 to 325, 200 to 350, 200 to 375, 200 to 400, 200 to 425, 200 to 450, 200 to 475, 200 to 500, 225 to 250, 225 to 275, 225 to 300, 225 to 325, 225 to 350, 225 to 375, 225 to 400, 225 to 425, 225 to 450, 225 to 475, 225 to 500, 250 to 275, 250 to 300, 275 to 300, 275 to 325, 275 to 350, 275 to 375, 275 to 400, 275 to 425, 275 to 450, 275 to 475, 275 to 500, 300 to 325, 300 to 350, 300 to 375, 300 to 400, 300 to 425, 300 to 450, 300 to 475, 300 to 500, 325 to 350, 325 to 375, 325 to 400, 325 to 425, 325 to 450, 325 to 475, 325 to 500, 350 to 375, 350 to 400, 350 to 425, 350 to 450, 350 to 475, 350 to 500, 375 to 400, 375 to 425, 375 to 450, 375 to 475, 375 to 500, 400 to 425, 400 to 450, 400 to 475, 400 to 500, 425 to 450, 425 to 475, 425 to 500, 450 to 475, 450 to 500, or 475 to 500 nucleotides in length. In some embodiments, the region of complementarity or substantial complementarity of the first editing template to the target double stranded DNA sequence is about 10 nucleotides in length. In some embodiments, the region of complementarity or substantial complementarity of the first editing template to the target double stranded DNA sequence is about 15 nucleotides in length. In some embodiments, the region of complementarity or substantial complementarity of the first editing template to the target double stranded DNA sequence is about 20 nucleotides in length. In some embodiments, the region of complementarity or substantial complementarity of the first editing template to the target double stranded DNA sequence is about 21, 22, 23, 24, or 25 nucleotides in length.

[0574] In some embodiments, the region of complementarity or substantial complementarity of the second editing template to the target double stranded DNA sequence is about 5 to 10, 5 to 15, 5 to 20, 5 to 25, 5 to 30, 5 to 35, 5 to 40, 5 to 45, 5 to 50, 5 to 55, 5 to 60, 5 to 65, 5 to 70, 5 to 75, 5 to 80, 5 to 85, 5 to 90, 5 to 95, 5 to 100, 5 to 110, 5 to 120, 5 to 130, 5 to 140, 5 to 150, 5 to 175, 5 to 200, 5 to 225, 5 to 250, 5 to 275, 5 to 300, 5 to 325, 5 to 350, 5 to 375, 5 to 400, 5 to 425, 5 to 450, 5 to 475, 5 to 500, 10 to 15, 10 to 20, 10 to 25, 10 to 30, 10 to 35, 10 to 40, 10 to 45, 10 to 50, 10 to 55, 10 to 60, 10 to 65, 10 to 70, 10 to 75, 10 to 80, 10 to 85, 10 to 90, 10 to 95, 10 to 100, 10 to 110, 10 to 120, 10 to 130, 10 to 140, 10 to 150, 10 to 175, 10 to 200, 10 to 225, 10 to 250, 10 to 275, 10 to 300, 10 to 325, 10 to 350, 10 to 375, 10 to 400, 10 to 425, 10 to 450, 10 to 475, 10 to 500, 15 to 20, 15 to 25, 15 to 30, 15 to 35, 15 to 40, 15 to 45, 15 to 50, 15 to 55, 15 to 60, 15 to 65, 15 to 70, 15 to 75, 15 to 80, 15 to 85, 15 to 90, 15 to 95, 15 to 100, 15 to 110, 15 to 120, 15 to 130, 15 to 140, 15 to 150, 15 to 175, 15 to 200, 15 to 225, 15 to 250, 15 to 275, 15 to 300, 15 to 325, 15 to 350, 15 to 375, 15 to 400, 15 to 425, 15 to 450, 15 to 475, 15 to 500, 20 to 25, 20 to 30, 20 to 35, 20 to 40, 20 to 45, 20 to 50, 20 to 55, 20 to 60, 20 to 65, 20 to 70, 20 to 75, 20 to 80, 20 to 85, 20 to 90, 20 to 95, 20 to 100, 20 to 110, 20 to 120, 20 to 130, 20 to 140, 20 to 150, 20 to 175, 20 to 200, 20 to 225, 20 to 250, 20 to 275, 20 to 300, 20 to 325, 20 to 350, 20 to 375, 20 to 400, 20 to 425, 20 to 450, 20 to 475, 20 to 500, 30 to 35, 30 to 40, 30 to 45, 30 to 50, 30 to 55, 30 to 60, 30 to 65, 30 to 70, 30 to 75, 30 to 80, 30 to 85, 30 to 90, 30 to 95, 30 to 100, 30 to 110, 30 to 120, 30 to 130, 30 to 140, 30 to 150, 30 to 175, 30 to 200, 30 to 225, 30 to 250, 30 to 275, 30 to 300, 30 to 325, 30 to 350, 30 to 375, 30 to 400, 30 to 425, 30 to 450, 30 to 475, 30 to 500, 40 to 45, 40 to 50, 40 to 55, 40 to 60, 40 to 65, 40 to 70, 40 to 75, 40 to 80, 40 to 85, 40 to 90, 40 to 95, 40 to 100, 40 to 110, 40 to 120, 40 to 130, 40 to 140, 40 to 150, 40 to 175, 40 to 200, 40 to 225, 40 to 250, 40 to 275, 40 to 300, 40 to 325, 40 to 350, 40 to 375, 40 to 400, 40 to 425, 40 to 450, 40 to 475, 40 to 500, 50 to 55, 50 to 60, 50 to 65, 50 to 70, 50 to 75, 50 to 80, 50 to 85, 50 to 90, 50 to 95, 50 to 100, 50 to 110, 50 to 120, 50 to 130, 50 to 140, 50 to 150, 50 to 175, 50 to 200, 50 to 225, 50 to 250, 50 to 275, 50 to 300, 50 to 325, 50 to 350, 50 to 375, 50 to 400, 50 to 425, 50 to 450, 50 to 475, 50 to 500, 75 to 80, 75 to 85, 75 to 90, 75 to 95, 75 to 100, 75 to 110, 75 to 120, 75 to 130, 75 to 140, 75 to 150, 75 to 175, 75 to 200, 75 to 225, 75 to 250, 75 to 275, 75 to 300, 75 to 325, 75 to 350, 75 to 375, 75 to 400, 75 to 425, 75 to 450, 75 to 475, 75 to 500, 100 to 110, 100 to 120, 100 to 130, 100 to 140, 100 to 150, 100 to 175, 100 to 200, 100 to 225, 100 to 250, 100 to 275, 100 to 300, 100 to 325, 100 to 350, 100 to 375, 100 to 400, 100 to 425, 100 to 450, 100 to 475, 100 to 500, 125 to 150, 125 to 175, 125 to 200, 125 to 225, 125 to 250, 125 to 275, 125 to 300, 125 to 325, 125 to 350, 125 to 375, 125 to 400, 125 to 425, 125 to 450, 125 to 475, 125 to 500, 150 to 175, 150 to 200, 150 to 225, 150 to 250, 150 to 275, 150 to 300, 150 to 325, 150 to 350, 150 to 375, 150 to 400, 150 to 425, 150 to 450, 150 to 475, 150 to 500, 175 to 200, 175 to 225, 175 to 250, 175 to 275, 175 to 300, 175 to 325, 175 to 350, 175 to 375, 175 to 400, 175 to 425, 175 to 450, 175 to 475, 175 to 500, 200 to 250, 200 to 275, 200 to 300, 200 to 325, 200 to 350, 200 to 375, 200 to 400, 200 to 425, 200 to 450, 200 to 475, 200 to 500, 225 to 250, 225 to 275, 225 to 300, 225 to 325, 225 to 350, 225 to 375, 225 to 400, 225 to 425, 225 to 450, 225 to 475, 225 to 500, 250 to 275, 250 to 300, 275 to 300, 275 to 325, 275 to 350, 275 to 375, 275 to 400, 275 to 425, 275 to 450, 275 to 475, 275 to 500, 300 to 325, 300 to 350, 300 to 375, 300 to 400, 300 to 425, 300 to 450, 300 to 475, 300 to 500, 325 to 350, 325 to 375, 325 to 400, 325 to 425, 325 to 450, 325 to 475, 325 to 500, 350 to 375, 350 to 400, 350 to 425, 350 to 450, 350 to 475, 350 to 500, 375 to 400, 375 to 425, 375 to 450, 375 to 475, 375 to 500, 400 to 425, 400 to 450, 400 to 475, 400 to 500, 425 to 450, 425 to 475, 425 to 500, 450 to 475, 450 to 500, or 475 to 500 nucleotides in length. In some embodiments, the region of complementarity or substantial complementarity of the second editing template to the target double stranded DNA sequence is about 10 nucleotides in length. In some embodiments, the region of complementarity or substantial complementarity of the second editing template to the target double stranded DNA sequence is about 15 nucleotides in length. In some embodiments, the region of complementarity or substantial complementarity of the second editing template to the target double stranded DNA sequence is about 20 nucleotides in length. In some embodiments, the region of complementarity or substantial complementarity of the second editing template to the target double stranded DNA sequence is about 21, 22, 23, 24, or 25 nucleotides in length.

[0575] In some embodiments, the first editing template comprises a region that does not have complementarity or substantial complementarity (the non-complementarity region) to the second editing template. In some embodiments, the first editing template comprises a region of complementarity or substantial complementarity to the second editing template, and further comprises a non-complementarity region to the second editing template. In some embodiments, the first editing template comprises a region of complementarity or substantial complementarity to the second editing template, a non-complementarity region to the second editing template, and a region of complementarity or substantial complementarity to the target double stranded DNA sequence.

[0576] In some embodiments, the second editing template comprises a region that does not have complementarity or substantial complementarity (the non-complementarity region) to the first editing template. In some embodiments, the second editing template comprises a region of complementarity or substantial complementarity to the first editing template, and further comprises a non-complementarity region to the first editing template. In some embodiments, the second editing template comprises a region of complementarity or substantial complementarity to the first editing template, a non-complementarity region to the first editing template, and a region of complementarity or substantial complementarity to the target double stranded DNA sequence.

[0577] In some embodiments, the region of non-complementarity of the first editing template to the second editing template and the region of non-complementarity of the second editing template to the first editing template are of the same length. In some embodiments, the region of non-complementarity of the first editing template to the second editing template and the region of non-complementarity of the second editing template to the first editing template are of different lengths. In some embodiments, the first editing template and the second editing template both comprise a region of non-complementarity to each other. In some embodiments, the first editing template comprises a region of non-complementarity to the second editing template, and the second editing template does not comprise a region of non-complementarity to the first editing template. In some embodiments, the second editing template comprises a region of non-complementarity to the first editing template, and the first editing template does not comprise a region of non-complementarity to the second editing template. For example, the first editing template may be complementary or substantially complementary to the second editing template through its entire length, while the second editing template comprises a region that does not have complementarity to the first editing template, or vice versa.

[0578] In some embodiments, the region of non-complementarity of the first editing template to the second editing template is about 5 to 10, 5 to 15, 5 to 20, 5 to 25, 5 to 30, 5 to 35, 5 to 40, 5 to 45, 5 to 50, 5 to 55, 5 to 60, 5 to 65, 5 to 70, 5 to 75, 5 to 80, 5 to 85, 5 to 90, 5 to 95, 5 to 100, 5 to 110, 5 to 120, 5 to 130, 5 to 140, 5 to 150, 5 to 175, 5 to 200, 5 to 225, 5 to 250, 5 to 275, 5 to 300, 5 to 325, 5 to 350, 5 to 375, 5 to 400, 5 to 425, 5 to 450, 5 to 475, 5 to 500, 10 to 15, 10 to 20, 10 to 25, 10 to 30, 10 to 35, 10 to 40, 10 to 45, 10 to 50, 10 to 55, 10 to 60, 10 to 65, 10 to 70, 10 to 75, 10 to 80, 10 to 85, 10 to 90, 10 to 95, 10 to 100, 10 to 110, 10 to 120, 10 to 130, 10 to 140, 10 to 150, 10 to 175, 10 to 200, 10 to 225, 10 to 250, 10 to 275, 10 to 300, 10 to 325, 10 to 350, 10 to 375, 10 to 400, 10 to 425, 10 to 450, 10 to 475, 10 to 500, 15 to 20, 15 to 25, 15 to 30, 15 to 35, 15 to 40, 15 to 45, 15 to 50, 15 to 55, 15 to 60, 15 to 65, 15 to 70, 15 to 75, 15 to 80, 15 to 85, 15 to 90, 15 to 95, 15 to 100, 15 to 110, 15 to 120, 15 to 130, 15 to 140, 15 to 150, 15 to 175, 15 to 200, 15 to 225, 15 to 250, 15 to 275, 15 to 300, 15 to 325, 15 to 350, 15 to 375, 15 to 400, 15 to 425, 15 to 450, 15 to 475, 15 to 500, 20 to 25, 20 to 30, 20 to 35, 20 to 40, 20 to 45, 20 to 50, 20 to 55, 20 to 60, 20 to 65, 20 to 70, 20 to 75, 20 to 80, 20 to 85, 20 to 90, 20 to 95, 20 to 100, 20 to 110, 20 to 120, 20 to 130, 20 to 140, 20 to 150, 20 to 175, 20 to 200, 20 to 225, 20 to 250, 20 to 275, 20 to 300, 20 to 325, 20 to 350, 20 to 375, 20 to 400, 20 to 425, 20 to 450, 20 to 475, 20 to 500, 30 to 35, 30 to 40, 30 to 45, 30 to 50, 30 to 55, 30 to 60, 30 to 65, 30 to 70, 30 to 75, 30 to 80, 30 to 85, 30 to 90, 30 to 95, 30 to 100, 30 to 110, 30 to 120, 30 to 130, 30 to 140, 30 to 150, 30 to 175, 30 to 200, 30 to 225, 30 to 250, 30 to 275, 30 to 300, 30 to 325, 30 to 350, 30 to 375, 30 to 400, 30 to 425, 30 to 450, 30 to 475, 30 to 500, 40 to 45, 40 to 50, 40 to 55, 40 to 60, 40 to 65, 40 to 70, 40 to 75, 40 to 80, 40 to 85, 40 to 90, 40 to 95, 40 to 100, 40 to 110, 40 to 120, 40 to 130, 40 to 140, 40 to 150, 40 to 175, 40 to 200, 40 to 225, 40 to 250, 40 to 275, 40 to 300, 40 to 325, 40 to 350, 40 to 375, 40 to 400, 40 to 425, 40 to 450, 40 to 475, 40 to 500, 50 to 55, 50 to 60, 50 to 65, 50 to 70, 50 to 75, 50 to 80, 50 to 85, 50 to 90, 50 to 95, 50 to 100, 50 to 110, 50 to 120, 50 to 130, 50 to 140, 50 to 150, 50 to 175, 50 to 200, 50 to 225, 50 to 250, 50 to 275, 50 to 300, 50 to 325, 50 to 350, 50 to 375, 50 to 400, 50 to 425, 50 to 450, 50 to 475, 50 to 500, 75 to 80, 75 to 85, 75 to 90, 75 to 95, 75 to 100, 75 to 110, 75 to 120, 75 to 130, 75 to 140, 75 to 150, 75 to 175, 75 to 200, 75 to 225, 75 to 250, 75 to 275, 75 to 300, 75 to 325, 75 to 350, 75 to 375, 75 to 400, 75 to 425, 75 to 450, 75 to 475, 75 to 500, 100 to 110, 100 to 120, 100 to 130, 100 to 140, 100 to 150, 100 to 175, 100 to 200, 100 to 225, 100 to 250, 100 to 275, 100 to 300, 100 to 325, 100 to 350, 100 to 375, 100 to 400, 100 to 425, 100 to 450, 100 to 475, 100 to 500, 125 to 150, 125 to 175, 125 to 200, 125 to 225, 125 to 250, 125 to 275, 125 to 300, 125 to 325, 125 to 350, 125 to 375, 125 to 400, 125 to 425, 125 to 450, 125 to 475, 125 to 500, 150 to 175, 150 to 200, 150 to 225, 150 to 250, 150 to 275, 150 to 300, 150 to 325, 150 to 350, 150 to 375, 150 to 400, 150 to 425, 150 to 450, 150 to 475, 150 to 500, 175 to 200, 175 to 225, 175 to 250, 175 to 275, 175 to 300, 175 to 325, 175 to 350, 175 to 375, 175 to 400, 175 to 425, 175 to 450, 175 to 475, 175 to 500, 200 to 250, 200 to 275, 200 to 300, 200 to 325, 200 to 350, 200 to 375, 200 to 400, 200 to 425, 200 to 450, 200 to 475, 200 to 500, 225 to 250, 225 to 275, 225 to 300, 225 to 325, 225 to 350, 225 to 375, 225 to 400, 225 to 425, 225 to 450, 225 to 475, 225 to 500, 250 to 275, 250 to 300, 275 to 300, 275 to 325, 275 to 350, 275 to 375, 275 to 400, 275 to 425, 275 to 450, 275 to 475, 275 to 500, 300 to 325, 300 to 350, 300 to 375, 300 to 400, 300 to 425, 300 to 450, 300 to 475, 300 to 500, 325 to 350, 325 to 375, 325 to 400, 325 to 425, 325 to 450, 325 to 475, 325 to 500, 350 to 375, 350 to 400, 350 to 425, 350 to 450, 350 to 475, 350 to 500, 375 to 400, 375 to 425, 375 to 450, 375 to 475, 375 to 500, 400 to 425, 400 to 450, 400 to 475, 400 to 500, 425 to 450, 425 to 475, 425 to 500, 450 to 475, 450 to 500, or 475 to 500 nucleotides in length. In some embodiments, the region of non-complementarity of the first editing template to the second editing template is about 1, 2, 3, 4, 5, 6, 7, 8, 9, 10, 11, 12, 13, 14, 15, 16, 17, 18, 19, 20, 21, 22, 23, 24, 25, 30, 35, 40, 45, 50, 60, 70, 80, 90, 100, 110, 120, 130, 140, 150, 160, 170, 180, 190, 200, 210, 220, 230, 240, 250, 260, 270, 280, 290, 300, 310, 320, 330, 340, 350, 360, 370, 380, 390, 400, 410, 420, 430, 440, 450, 460, 470, 480, 490, or 500 or more nucleotides in length.

[0579] In some embodiments, the region of non-complementarity of the second editing template to the first editing template is about 5 to 10, 5 to 15, 5 to 20, 5 to 25, 5 to 30, 5 to 35, 5 to 40, 5 to 45, 5 to 50, 5 to 55, 5 to 60, 5 to 65, 5 to 70, 5 to 75, 5 to 80, 5 to 85, 5 to 90, 5 to 95, 5 to 100, 5 to 110, 5 to 120, 5 to 130, 5 to 140, 5 to 150, 5 to 175, 5 to 200, 5 to 225, 5 to 250, 5 to 275, 5 to 300, 5 to 325, 5 to 350, 5 to 375, 5 to 400, 5 to 425, 5 to 450, 5 to 475, 5 to 500, 10 to 15, 10 to 20, 10 to 25, 10 to 30, 10 to 35, 10 to 40, 10 to 45, 10 to 50, 10 to 55, 10 to 60, 10 to 65, 10 to 70, 10 to 75, 10 to 80, 10 to 85, 10 to 90, 10 to 95, 10 to 100, 10 to 110, 10 to 120, 10 to 130, 10 to 140, 10 to 150, 10 to 175, 10 to 200, 10 to 225, 10 to 250, 10 to 275, 10 to 300, 10 to 325, 10 to 350, 10 to 375, 10 to 400, 10 to 425, 10 to 450, 10 to 475, 10 to 500, 15 to 20, 15 to 25, 15 to 30, 15 to 35, 15 to 40, 15 to 45, 15 to 50, 15 to 55, 15 to 60, 15 to 65, 15 to 70, 15 to 75, 15 to 80, 15 to 85, 15 to 90, 15 to 95, 15 to 100, 15 to 110, 15 to 120, 15 to 130, 15 to 140, 15 to 150, 15 to 175, 15 to 200, 15 to 225, 15 to 250, 15 to 275, 15 to 300, 15 to 325, 15 to 350, 15 to 375, 15 to 400, 15 to 425, 15 to 450, 15 to 475, 15 to 500, 20 to 25, 20 to 30, 20 to 35, 20 to 40, 20 to 45, 20 to 50, 20 to 55, 20 to 60, 20 to 65, 20 to 70, 20 to 75, 20 to 80, 20 to 85, 20 to 90, 20 to 95, 20 to 100, 20 to 110, 20 to 120, 20 to 130, 20 to 140, 20 to 150, 20 to 175, 20 to 200, 20 to 225, 20 to 250, 20 to 275, 20 to 300, 20 to 325, 20 to 350, 20 to 375, 20 to 400, 20 to 425, 20 to 450, 20 to 475, 20 to 500, 30 to 35, 30 to 40, 30 to 45, 30 to 50, 30 to 55, 30 to 60, 30 to 65, 30 to 70, 30 to 75, 30 to 80, 30 to 85, 30 to 90, 30 to 95, 30 to 100, 30 to 110, 30 to 120, 30 to 130, 30 to 140, 30 to 150, 30 to 175, 30 to 200, 30 to 225, 30 to 250, 30 to 275, 30 to 300, 30 to 325, 30 to 350, 30 to 375, 30 to 400, 30 to 425, 30 to 450, 30 to 475, 30 to 500, 40 to 45, 40 to 50, 40 to 55, 40 to 60, 40 to 65, 40 to 70, 40 to 75, 40 to 80, 40 to 85, 40 to 90, 40 to 95, 40 to 100, 40 to 110, 40 to 120, 40 to 130, 40 to 140, 40 to 150, 40 to 175, 40 to 200, 40 to 225, 40 to 250, 40 to 275, 40 to 300, 40 to 325, 40 to 350, 40 to 375, 40 to 400, 40 to 425, 40 to 450, 40 to 475, 40 to 500, 50 to 55, 50 to 60, 50 to 65, 50 to 70, 50 to 75, 50 to 80, 50 to 85, 50 to 90, 50 to 95, 50 to 100, 50 to 110, 50 to 120, 50 to 130, 50 to 140, 50 to 150, 50 to 175, 50 to 200, 50 to 225, 50 to 250, 50 to 275, 50 to 300, 50 to 325, 50 to 350, 50 to 375, 50 to 400, 50 to 425, 50 to 450, 50 to 475, 50 to 500, 75 to 80, 75 to 85, 75 to 90, 75 to 95, 75 to 100, 75 to 110, 75 to 120, 75 to 130, 75 to 140, 75 to 150, 75 to 175, 75 to 200, 75 to 225, 75 to 250, 75 to 275, 75 to 300, 75 to 325, 75 to 350, 75 to 375, 75 to 400, 75 to 425, 75 to 450, 75 to 475, 75 to 500, 100 to 110, 100 to 120, 100 to 130, 100 to 140, 100 to 150, 100 to 175, 100 to 200, 100 to 225, 100 to 250, 100 to 275, 100 to 300, 100 to 325, 100 to 350, 100 to 375, 100 to 400, 100 to 425, 100 to 450, 100 to 475, 100 to 500, 125 to 150, 125 to 175, 125 to 200, 125 to 225, 125 to 250, 125 to 275, 125 to 300, 125 to 325, 125 to 350, 125 to 375, 125 to 400, 125 to 425, 125 to 450, 125 to 475, 125 to 500, 150 to 175, 150 to 200, 150 to 225, 150 to 250, 150 to 275, 150 to 300, 150 to 325, 150 to 350, 150 to 375, 150 to 400, 150 to 425, 150 to 450, 150 to 475, 150 to 500, 175 to 200, 175 to 225, 175 to 250, 175 to 275, 175 to 300, 175 to 325, 175 to 350, 175 to 375, 175 to 400, 175 to 425, 175 to 450, 175 to 475, 175 to 500, 200 to 250, 200 to 275, 200 to 300, 200 to 325, 200 to 350, 200 to 375, 200 to 400, 200 to 425, 200 to 450, 200 to 475, 200 to 500, 225 to 250, 225 to 275, 225 to 300, 225 to 325, 225 to 350, 225 to 375, 225 to 400, 225 to 425, 225 to 450, 225 to 475, 225 to 500, 250 to 275, 250 to 300, 275 to 300, 275 to 325, 275 to 350, 275 to 375, 275 to 400, 275 to 425, 275 to 450, 275 to 475, 275 to 500, 300 to 325, 300 to 350, 300 to 375, 300 to 400, 300 to 425, 300 to 450, 300 to 475, 300 to 500, 325 to 350, 325 to 375, 325 to 400, 325 to 425, 325 to 450, 325 to 475, 325 to 500, 350 to 375, 350 to 400, 350 to 425, 350 to 450, 350 to 475, 350 to 500, 375 to 400, 375 to 425, 375 to 450, 375 to 475, 375 to 500, 400 to 425, 400 to 450, 400 to 475, 400 to 500, 425 to 450, 425 to 475, 425 to 500, 450 to 475, 450 to 500, or 475 to 500 nucleotides in length. In some embodiments, the region of non-complementarity of the second editing template to the first editing template is about 1, 2, 3, 4, 5, 6, 7, 8, 9, 10, 11, 12, 13, 14, 15, 16, 17, 18, 19, 20, 21, 22, 23, 24, 25, 30, 35, 40, 45, 50, 60, 70, 80, 90, 100, 110, 120, 130, 140, 150, 160, 170, 180, 190, 200, 210, 220, 230, 240, 250, 260, 270, 280, 290, 300, 310, 320, 330, 340, 350, 360, 370, 380, 390, 400, 410, 420, 430, 440, 450, 460, 470, 480, 490, or 500 or more nucleotides in length.

[0580] In some embodiments, the first PEgRNA and the second PEgRNA have the same gRNA cores. In some embodiments, the first PEgRNA and the second PEgRNA have different gRNA cores.

[0581] Exemplary combinations of PEgRNA components, e.g., spacer, PBS, and edit template/RTT, as well as combinations of each PEgRNA are provided in Tables 1A-36B. Tables 1A-19B contain PEgRNA and components of exemplary 5′ PEgRNAs. Tables 20A-36B contain PEgRNA and components of exemplary 3′ PEgRNAs. Each table corresponds to a specific spacer number. Each of these tables labeled with “A” contain four columns: from left to right, the first column is the sequence number, the second column provides the sequence of the component by reference to a SEQ ID NO. consistent with ST.26, the third column provides a description, and the fourth column provides the actual sequence. Each of these tables labeled with “B” include sequences of PEgRNAs and contain five columns: from left to right, the first column is the sequence number, the second column provides the sequence of the component by reference to a SEQ ID NO. consistent with ST.26, the third column provides the actual sequence, the fourth column provides the length of the PBS of the PEgRNA, and the fifth column provides a RTT Pairing number. Each 5′ PEgRNA having a specific RTT Pairing number can be used in a dual prime editing system with a 3′ PEgRNA that has the same RTT Pairing number. Although all the sequences provided in Tables 1A-36B are RNA sequences, “T” is used instead of a “U” in the sequences for consistency with the ST.26 standard used in the accompanying sequence listing.

Lengthy table referenced here
US20240360476A1-20241031-T00001
Please refer to the end of the specification for access instructions.

Lengthy table referenced here
US20240360476A1-20241031-T00002
Please refer to the end of the specification for access instructions.

Lengthy table referenced here
US20240360476A1-20241031-T00003
Please refer to the end of the specification for access instructions.

Lengthy table referenced here
US20240360476A1-20241031-T00004
Please refer to the end of the specification for access instructions.

Lengthy table referenced here
US20240360476A1-20241031-T00005
Please refer to the end of the specification for access instructions.

Lengthy table referenced here
US20240360476A1-20241031-T00006
Please refer to the end of the specification for access instructions.

Lengthy table referenced here
US20240360476A1-20241031-T00007
Please refer to the end of the specification for access instructions.

Lengthy table referenced here
US20240360476A1-20241031-T00008
Please refer to the end of the specification for access instructions.

Lengthy table referenced here
US20240360476A1-20241031-T00009
Please refer to the end of the specification for access instructions.

Lengthy table referenced here
US20240360476A1-20241031-T00010
Please refer to the end of the specification for access instructions.

Lengthy table referenced here
US20240360476A1-20241031-T00011
Please refer to the end of the specification for access instructions.

Lengthy table referenced here
US20240360476A1-20241031-T00012
Please refer to the end of the specification for access instructions.

Lengthy table referenced here
US20240360476A1-20241031-T00013
Please refer to the end of the specification for access instructions.

Lengthy table referenced here
US20240360476A1-20241031-T00014
Please refer to the end of the specification for access instructions.

Lengthy table referenced here
US20240360476A1-20241031-T00015
Please refer to the end of the specification for access instructions.

Lengthy table referenced here
US20240360476A1-20241031-T00016
Please refer to the end of the specification for access instructions.

Lengthy table referenced here
US20240360476A1-20241031-T00017
Please refer to the end of the specification for access instructions.

Lengthy table referenced here
US20240360476A1-20241031-T00018
Please refer to the end of the specification for access instructions.

Lengthy table referenced here
US20240360476A1-20241031-T00019
Please refer to the end of the specification for access instructions.

Lengthy table referenced here
US20240360476A1-20241031-T00020
Please refer to the end of the specification for access instructions.

Lengthy table referenced here
US20240360476A1-20241031-T00021
Please refer to the end of the specification for access instructions.

Lengthy table referenced here
US20240360476A1-20241031-T00022
Please refer to the end of the specification for access instructions.

Lengthy table referenced here
US20240360476A1-20241031-T00023
Please refer to the end of the specification for access instructions.

Lengthy table referenced here
US20240360476A1-20241031-T00024
Please refer to the end of the specification for access instructions.

Lengthy table referenced here
US20240360476A1-20241031-T00025
Please refer to the end of the specification for access instructions.

Lengthy table referenced here
US20240360476A1-20241031-T00026
Please refer to the end of the specification for access instructions.

Lengthy table referenced here
US20240360476A1-20241031-T00027
Please refer to the end of the specification for access instructions.

Lengthy table referenced here
US20240360476A1-20241031-T00028
Please refer to the end of the specification for access instructions.

Lengthy table referenced here
US20240360476A1-20241031-T00029
Please refer to the end of the specification for access instructions.

Lengthy table referenced here
US20240360476A1-20241031-T00030
Please refer to the end of the specification for access instructions.

Lengthy table referenced here
US20240360476A1-20241031-T00031
Please refer to the end of the specification for access instructions.

Lengthy table referenced here
US20240360476A1-20241031-T00032
Please refer to the end of the specification for access instructions.

Lengthy table referenced here
US20240360476A1-20241031-T00033
Please refer to the end of the specification for access instructions.

Lengthy table referenced here
US20240360476A1-20241031-T00034
Please refer to the end of the specification for access instructions.

Lengthy table referenced here
US20240360476A1-20241031-T00035
Please refer to the end of the specification for access instructions.

Lengthy table referenced here
US20240360476A1-20241031-T00036
Please refer to the end of the specification for access instructions.

Lengthy table referenced here
US20240360476A1-20241031-T00037
Please refer to the end of the specification for access instructions.

Lengthy table referenced here
US20240360476A1-20241031-T00038
Please refer to the end of the specification for access instructions.

Lengthy table referenced here
US20240360476A1-20241031-T00039
Please refer to the end of the specification for access instructions.

Lengthy table referenced here
US20240360476A1-20241031-T00040
Please refer to the end of the specification for access instructions.

Lengthy table referenced here
US20240360476A1-20241031-T00041
Please refer to the end of the specification for access instructions.

Lengthy table referenced here
US20240360476A1-20241031-T00042
Please refer to the end of the specification for access instructions.

Lengthy table referenced here
US20240360476A1-20241031-T00043
Please refer to the end of the specification for access instructions.

Lengthy table referenced here
US20240360476A1-20241031-T00044
Please refer to the end of the specification for access instructions.

Lengthy table referenced here
US20240360476A1-20241031-T00045
Please refer to the end of the specification for access instructions.

Lengthy table referenced here
US20240360476A1-20241031-T00046
Please refer to the end of the specification for access instructions.

Lengthy table referenced here
US20240360476A1-20241031-T00047
Please refer to the end of the specification for access instructions.

Lengthy table referenced here
US20240360476A1-20241031-T00048
Please refer to the end of the specification for access instructions.

Lengthy table referenced here
US20240360476A1-20241031-T00049
Please refer to the end of the specification for access instructions.

Lengthy table referenced here
US20240360476A1-20241031-T00050
Please refer to the end of the specification for access instructions.

Lengthy table referenced here
US20240360476A1-20241031-T00051
Please refer to the end of the specification for access instructions.

Lengthy table referenced here
US20240360476A1-20241031-T00052
Please refer to the end of the specification for access instructions.

Lengthy table referenced here
US20240360476A1-20241031-T00053
Please refer to the end of the specification for access instructions.

Lengthy table referenced here
US20240360476A1-20241031-T00054
Please refer to the end of the specification for access instructions.

Lengthy table referenced here
US20240360476A1-20241031-T00055
Please refer to the end of the specification for access instructions.

Lengthy table referenced here
US20240360476A1-20241031-T00056
Please refer to the end of the specification for access instructions.

Lengthy table referenced here
US20240360476A1-20241031-T00057
Please refer to the end of the specification for access instructions.

Lengthy table referenced here
US20240360476A1-20241031-T00058
Please refer to the end of the specification for access instructions.

Lengthy table referenced here
US20240360476A1-20241031-T00059
Please refer to the end of the specification for access instructions.

Lengthy table referenced here
US20240360476A1-20241031-T00060
Please refer to the end of the specification for access instructions.

Lengthy table referenced here
US20240360476A1-20241031-T00061
Please refer to the end of the specification for access instructions.

Lengthy table referenced here
US20240360476A1-20241031-T00062
Please refer to the end of the specification for access instructions.

Lengthy table referenced here
US20240360476A1-20241031-T00063
Please refer to the end of the specification for access instructions.

Lengthy table referenced here
US20240360476A1-20241031-T00064
Please refer to the end of the specification for access instructions.

Lengthy table referenced here
US20240360476A1-20241031-T00065
Please refer to the end of the specification for access instructions.

Lengthy table referenced here
US20240360476A1-20241031-T00066
Please refer to the end of the specification for access instructions.

Lengthy table referenced here
US20240360476A1-20241031-T00067
Please refer to the end of the specification for access instructions.

Lengthy table referenced here
US20240360476A1-20241031-T00068
Please refer to the end of the specification for access instructions.

Lengthy table referenced here
US20240360476A1-20241031-T00069
Please refer to the end of the specification for access instructions.

Lengthy table referenced here
US20240360476A1-20241031-T00070
Please refer to the end of the specification for access instructions.

Lengthy table referenced here
US20240360476A1-20241031-T00071
Please refer to the end of the specification for access instructions.

Lengthy table referenced here
US20240360476A1-20241031-T00072
Please refer to the end of the specification for access instructions.

### Tables 5A and 5B

[0582] Tables 5A and 5B provide exemplary 5′ PEgRNAs and components that can be used with any prime editor containing a Cas9 protein capable of recognizing a NGG PAM sequence, wherein N is A, G, C, or T. The PEgRNAs exemplified in Tables 5A and 5B comprise: (a) a spacer comprising at its 3′ end a sequence corresponding to nucleotides 5-20 of sequence number 77, (b) a gRNA core capable of binding to a Cas9 protein, and (c) an extension arm comprising (i) an editing template and (ii) a primer binding site (PBS) comprising at its 5′ end the sequence corresponding to sequence number 92.

[0583] The PEgRNA spacer can be, for example, 16-22 nucleotides in length. In some embodiments, the PEgNA spacer is 16-20 nucleotides in length. In some embodiments, the PEgRNA spacer comprises at its 3′ end nucleotides 5-20, 4-20, 3-20, 2-20, or 1-20 of sequence number 77. In some embodiments, the PEgRNA spacer comprises the sequence of sequence number 77. In some embodiments, the PEgRNA spacer is 20 nucleotides in length. Any of these spacers exemplified can be referred to as 5′ spacer No. 5.

[0584] The PBS can be, for example, 3 to 19 nucleotides in length. In some embodiments, the PBS is 3 to 17 nucleotides in length and corresponds to sequence number 78, 79, 80, 81, 8 [symbol] , 84, 85, 86, 87, 88, 89, 90, 91, or 92. In some cases, a PBS length of no more than 3 nucleot [symbol] less than the PEgRNA spacer length is chosen.

[0585] The 5′ PEgRNAs of Tables 5A and 5B can be used in a dual prime editing system or composition further comprising any suitable 3′ PEgRNA. The prime editing system can be used, e.g., for editing a DMPK gene harboring 50 or more CTG repeats.

[0586] In some embodiments, a prime editing composition comprises a 5′ PEgRNA having sequences or components exemplified in Tables 5A and 5B and a 3′ PEgRNA, wherein the editing templates of the 5′ PEgRNA and the 3′ PEgRNA each comprises a region of complementarity to each other. For example, the editing template of the 5′ PEgRNA can comprise any of the RTT sequences provided in Table 37. The terms “editing template” and “RTT” may be used interchangeably. Each of the RTT sequences in Table 37 is assigned a RTT Pairing number that reflects the complementarity relationship between a 5′ RTT and a 3′ RTT. The 5′ PEgRNA can be used in a dual prime editing system that further comprises a 3′ PEgRNA, e.g., a 3′ PEgRNA having a spacer sequence and a corresponding PBS as exemplified in Tables 20A-36B, wherein the 3′ PEgRNA comprises an editing template comprising a RTT sequence having a region of complementarity to the 5′ RTT. The 3′ RTT can comprise any of the RTT sequences provided in Table 38, wherein the 3′ RTT sequence has the same RTT Pairing number as that of the 5′ RTT. The editing templates of the 5′ PEgRNA and the 3′ PEgRNA can be completely complementary to each other, wherein the 5′ editing template and the 3′ editing template have the same length and perfect complementarity to each other. Alternatively, the 5′ editing template can comprise a region of complementarity to the 3′ editing template, and further comprise a non-complementary region to the 3′ editing template. The 3′ editing template can comprise a region of complementarity to the 5′ editing template, and further comprise a non-complementary region to the 5′ editing template. The non-complementary region can be at the 5′ end or the 3′ end of the editing templates. Contacting the target DMPK gene with the prime editing system can result in deletion of the sequence between the 5′ PEgRNA nick and the 3′ PEgRNA nick (the IND) and insertion of the region of complementarity between the 5′ editing template and the 3′ editing template (the OD), or insertion of the region of complementarity between the 5′ editing template and the 3′ editing template as well as the non-complementarity regions (together referred to as the RD), and hence replace the CTG repeats with the sequence of the OD or the RD. In some embodiments, the 5′ PEgRNA comprises a sequence selected from sequence numbers 93-468 and 3495. In some embodiments, the 5′ PEgRNA comprises a sequence selected from sequence numbers 93-95. In some embodiments, the 5′ PEgRNA comprises a sequence selected from sequence numbers 96-180 and 3495. In some embodiments, the 5′ PEgRNA comprises a sequence selected from sequence numbers 181-436. In some embodiments, the 5′ PEgRNA comprises a sequence selected from sequence numbers 436-468. Each of the 5′ PEgRNA is assigned a RTT Pairing number, and can be used in a dual prime editing composition with a 3′ PEgRNA comprising an RTT having the same RTT Pairing number.

[0587] In some embodiments, a prime editing composition comprises a 5′ PEgRNA or component thereof exemplified in Tables 5A and 5B and a 3′ PEgRNA, wherein the editing template of the 5′ PEgRNA comprises a region of identity to the spacer of the 3′ PEgRNA. In some embodiments, the editing template of the 3′ PEgRNA comprises a region of identity to the spacer of the 5′ PEgRNA. In some embodiments, the 5′ editing template comprises a region of complementarity to a region on the second strand of the DMPK gene that is directly 3′ to nucleotide 3 of the search target sequence of the 3′ PEgRNA. In some embodiments, the 3′ editing template comprises a region of complementarity to a region on the first strand of the DMPK gene that is directly 3′ to nucleotide 3 of the search target sequence of the 5′ PEgRNA. For example, the extension arm of the 5′ PEgRNA can comprise an editing template comprising the sequence of any of the RTT sequences provided in Table 39. Each of the RTT sequences in Table 39 is assigned a Pairing 3′ spacer number. The 5′ PEgRNA can be used in a dual prime editing system with a 3′ PEgRNA, wherein the 3′ PEgRNA comprises a spacer that has the Pairing 3′ spacer number assigned to the 5′ RTT in Table 39. Contacting the target DMPK gene with the prime editing system can result in deletion of the sequence between the 5′ PEgRNA nick and the 3′ PEgRNA nick (the IND) without insertion of any exogenous sequence (a “clean deletion”). For example, the 3′ PEgRNA can also comprises a “clean deletion” RTT, e.g., a 3′ RTT selected from Table 40 that is assigned a Pairing 5′ spacer number 5. Alternatively, the 5′ editing template and the 3′ editing template can further comprise a region of complementarity to each other, and the region of complementarity can replace the IND in the DMPK gene. In some embodiments, the 5′ PEgRNA is part of a dual prime editing composition that further comprises a 3′ PEgRNA, wherein the 5′ PEgRNA comprises a RTT comprising a sequence selected from sequence numbers 3459-3461 and 3467-3471, and the 3′ PEgRNA comprises a spacer comprising nucleotides 5-20 of sequence number 1525. In some embodiments, the 5′ PEgRNA is part of a dual prime editing composition that further comprises a 3′ PEgRNA, wherein the 5′ PEgRNA comprises a RTT comprising a sequence selected from sequence numbers 3462-3466, and the 3′ PEgRNA comprises a spacer comprising nucleotides 5-20 of sequence number 2353. In some embodiments, the 5′ PEgRNA is part of a dual prime editing composition that further comprises a 3′ PEgRNA, wherein the 5′ PEgRNA comprises a RTT comprising a sequence selected from sequence numbers 3472-3476, and the 3′ PEgRNA comprises a spacer comprising nucleotides 5-20 of sequence number 1936. In some embodiments, the 5′ PEgRNA is part of a dual prime editing composition that further comprises a 3′ PEgRNA, wherein the 5′ PEgRNA comprises a RTT comprising nucleotides x-40 of sequence number 3647, 3648, 3649, 3650, 3651, 3652, 3653, 3654, 3655, 3656, 3657, 3658, 3659, 3660, 3661, 3662, or 3663, wherein the 3′ PEgRNA comprises a spacer comprising nucleotides 5-20 of sequence number 1900, 1918, 1403, 1936, 2263, 2353, 1503, 2281, 2673, 1525, 2299, 2317, 1864, 1359, 2335, 1882, or 1381 respectively in the same order, and wherein x is any integer from 1 to 31. In some embodiments, the 5′ PEgRNA comprises a sequence selected from sequence numbers 469-483 and 3683-3697. Each 5′ PEgRNA is assigned a RTT Pairing number, which corresponds to a Pairing 3′ spacer number in Table 39. The 5′ PEgRNA can be used in a dual prime editing system or composition with a 3′ PEgRNA comprising a spacer of the same Pairing 3′ spacer number. In some embodiments, the 5′ PEgRNA comprises a sequence selected from sequence numbers 473, 475, 476, 479, and 480, and is used in a prime editing system further comprising a 3′ PEgRNA having a spacer comprising nucleotides 5-20, 4-20, 3-20, 2-20, or 1-20 of SEQ ID NO: 2353. In some embodiments, the 5′ PEgRNA comprises a sequence selected from sequence numbers 469, 470, 481, 482, and 483, and is used in a prime editing system further comprising a 3′ PEgRNA having a spacer comprising nucleotides 5-20, 4-20, 3-20, 2-20, or 1-20 of SEQ ID NO: 1525. In some embodiments, the 5′ PEgRNA comprises a sequence selected from sequence numbers 471, 472, 474, 477, 478, and 3688-3692, and is used in a prime editing system further comprising a 3′ PEgRNA having a spacer comprising nucleotides 5-20, 4-20, 3-20, 2-20, or 1-20 of SEQ ID NO: 1936. In some embodiments, the 5′ PEgRNA comprises a sequence selected from sequence numbers 3683-3687, and is used in a prime editing system further comprising a 3′ PEgRNA having a spacer comprising nucleotides 5-20, 4-20, 3-20, 2-20, or 1-20 of SEQ ID NO: 1900. In some embodiments, the 5′ PEgRNA comprises a sequence selected from sequence numbers 3693-3697, and is used in a prime editing system further comprising a 3′ PEgRNA having a spacer comprising nucleotides 5-20, 4-20, 3-20, 2-20, or 1-20 of SEQ ID No. 2673.

### Tables 8A and 8B

[0588] Tables 8A and 8B provide exemplary 5′ PEgRNAs and components that can be used with any prime editor containing a Cas9 protein capable of recognizing a NGG PAM sequence, wherein N is A, G, C, or T. The PEgRNAs exemplified in Tables 8A and 8B comprise: (a) a spacer comprising at its 3′ end a sequence corresponding to nucleotides 5-20 of sequence number 536, (b) a gRNA core capable of binding to a Cas9 protein, and (c) an extension arm comprising (i) an editing template and (ii) a primer binding site (PBS) comprising at its 5′ end the sequence corresponding to sequence number 551.

[0589] The PEgRNA spacer can be, for example, 16-22 nucleotides in length. In some embodiments, the PEgNA spacer is 16-20 nucleotides in length. In some embodiments, the PEgRNA spacer comprises at its 3′ end nucleotides 5-20, 4-20, 3-20, 2-20, or 1-20 of sequence number 536. In some embodiments, the PEgRNA spacer comprises the sequence of sequence number 536. In some embodiments, the PEgRNA spacer is 20 nucleotides in length. Any of these spacers exemplified can be referred to as 5′ spacer No. 8.

[0590] The PBS can be, for example, 3 to 19 nucleotides in length. In some embodiments, the PBS is 3 to 17 nucleotides in length and corresponds to sequence number 537, 538, 539, 540, 541, 542, 543, 544, 545, 546, 547, 548, 549, 550, or 551. In some cases, a PBS length of no more than 3 nucleotides less than the PEgRNA spacer length is chosen.

[0591] The 5′ PEgRNAs of Tables 8A and 8B can be used in a dual prime editing system or composition further comprising any suitable 3′ PEgRNA. The prime editing system can be used, e.g., for editing a DMPK gene harboring 50 or more CTG repeats.

[0592] In some embodiments, a prime editing composition comprises a 5′ PEgRNA having sequences or components exemplified in Tables 8A and 8B and a 3′ PEgRNA, wherein the editing templates of the 5′ PEgRNA and the 3′ PEgRNA each comprises a region of complementarity to each other. For example, the editing template of the 5′ PEgRNA can comprise any of the RTT sequences provided in Table 37. The terms “editing template” and “RTT” may be used interchangeably. Each of the RTT sequences in Table 37 is assigned a RTT Pairing number that reflects the complementarity relationship between a 5′ RTT and a 3′ RTT. The 5′ PEgRNA can be used in a dual prime editing system that further comprises a 3′ PEgRNA, e.g., a 3′ PEgRNA having a spacer sequence and a corresponding PBS as exemplified in Tables 20A-36B, wherein the 3′ PEgRNA comprises an editing template comprising a RTT sequence having a region of complementarity to the 5′ RTT. The 3′ RTT can comprise any of the RTT sequences provided in Table 38, wherein the 3′ RTT sequence has the same RTT Pairing number as that of the 5′ RTT. The editing templates of the 5′ PEgRNA and the 3′ PEgRNA can be completely complementary to each other, wherein the 5′ editing template and the 3′ editing template have the same length and perfect complementarity to each other. Alternatively, the 5′ editing template can comprise a region of complementarity to the 3′ editing template, and further comprise a non-complementary region to the 3′ editing template. The 3′ editing template can comprise a region of complementarity to the 5′ editing template, and further comprise a non-complementary region to the 5′ editing template. The non-complementary region can be at the 5′ end or the 3′ end of the editing templates. Contacting the target DMPK gene with the prime editing system can result in deletion of the sequence between the 5′ PEgRNA nick and the 3′ PEgRNA nick (the IND) and insertion of the region of complementarity between the 5′ editing template and the 3′ editing template (the OD), or insertion of the region of complementarity between the 5′ editing template and the 3′ editing template as well as the non-complementarity regions (together referred to as the RD), and hence replace the CTG repeats with the sequence of the OD or the RD. In some embodiments, the 5′ PEgRNA comprises the sequence of sequence number 552 or 553. Each of the 5′ PEgRNA is assigned a RTT Pairing number, and can be used in a dual prime editing composition with a 3′ PEgRNA comprising an RTT having the same RTT Pairing number.

[0593] In some embodiments, a prime editing composition comprises a 5′ PEgRNA or component thereof exemplified in Tables 8A and 8B and a 3′ PEgRNA, wherein the editing template of the 5′ PEgRNA comprises a region of identity to the spacer of the 3′ PEgRNA. In some embodiments, the editing template of the 3′ PEgRNA comprises a region of identity to the spacer of the 5′ PEgRNA. In some embodiments, the 5′ editing template comprises a region of complementarity to a region on the second strand of the DMPK gene that is directly 3′ to nucleotide 3 of the search target sequence of the 3′ PEgRNA. In some embodiments, the 3′ editing template comprises a region of complementarity to a region on the first strand of the DMPK gene that is directly 3′ to nucleotide 3 of the search target sequence of the 5′ PEgRNA. For example, the extension arm of the 5′ PEgRNA can comprise an editing template comprising the sequence of any of the RTT sequences provided in Table 39. Each of the RTT sequences in Table 39 is assigned a Pairing 3′ spacer number. The 5′ PEgRNA can be used in a dual prime editing system with a 3′ PEgRNA, wherein the 3′ PEgRNA comprises a spacer that has the Pairing 3′ spacer number assigned to the 5′ RTT in Table 39. Contacting the target DMPK gene with the prime editing system can result in deletion of the sequence between the 5′ PEgRNA nick and the 3′ PEgRNA nick (the IND) without insertion of any exogenous sequence (a “clean deletion”). For example, the 3′ PEgRNA can also comprises a “clean deletion” RTT, e.g., a 3′ RTT selected from Table 40 that is assigned a Pairing 5′ spacer number 8. Alternatively, the 5′ editing template and the 3′ editing template can further comprise a region of complementarity to each other, and the region of complementarity can replace the IND in the DMPK gene. In some embodiments, the 5′ PEgRNA is part of a dual prime editing composition that further comprises a 3′ PEgRNA, wherein the 5′ PEgRNA comprises a RTT comprising a sequence selected from sequence numbers 3459-3461 and 3467-3471, and the 3′ PEgRNA comprises a spacer comprising nucleotides 5-20 of sequence number 1525. In some embodiments, the 5′ PEgRNA is part of a dual prime editing composition that further comprises a 3′ PEgRNA, wherein the 5′ PEgRNA comprises a RTT comprising a sequence selected from sequence numbers 3462-3466, and the 3′ PEgRNA comprises a spacer comprising nucleotides 5-20 of sequence number 2353. In some embodiments, the 5′ PEgRNA is part of a dual prime editing composition that further comprises a 3′ PEgRNA, wherein the 5′ PEgRNA comprises a RTT comprising a sequence selected from sequence numbers 3472-3476, and the 3′ PEgRNA comprises a spacer comprising nucleotides 5-20 of sequence number 1936. In some embodiments, the 5′ PEgRNA is part of a dual prime editing composition that further comprises a 3′ PEgRNA, wherein the 5′ PEgRNA comprises a RTT comprising nucleotides x-40 of sequence number 3647, 3648, 3649, 3650, 3651, 3652, 3653, 3654, 3655, 3656, 3657, 3658, 3659, 3660, 3661, 3662, or 3663, wherein the 3′ PEgRNA comprises a spacer comprising nucleotides 5-20 of sequence number 1900, 1918, 1403, 1936, 2263, 2353, 1503, 2281, 2673, 1525, 2299, 2317, 1864, 1359, 2335, 1882, or 1381 respectively in the same order, and wherein x is any integer from 1 to 31. In some embodiments, the 5′ PEgRNA comprises a sequence selected from sequence numbers 3698-3712. Each 5′ PEgRNA is assigned a RTT Pairing number, which corresponds to a Pairing 3′ spacer number in Table 39. The 5′ PEgRNA can be used in a dual prime editing system or composition with a 3′ PEgRNA comprising a spacer of the same Pairing 3′ spacer number. In some embodiments, the 5′ PEgRNA comprises a sequence selected from sequence numbers 3703-3707, and is used in a prime editing system further comprising a 3′ PEgRNA having a spacer comprising nucleotides 5-20, 4-20, 3-20, 2-20, or 1-20 of SEQ ID NO: 1936. In some embodiments, the 5′ PEgRNA comprises a sequence selected from sequence numbers 3698-3702, and is used in a prime editing system further comprising a 3′ PEgRNA having a spacer comprising nucleotides 5-20, 4-20, 3-20, 2-20, or 1-20 of SEQ ID NO: 1900. In some embodiments, the 5′ PEgRNA comprises a sequence selected from sequence numbers 3708-3712, and is used in a prime editing system further comprising a 3′ PEgRNA having a spacer comprising nucleotides 5-20, 4-20, 3-20, 2-20, or 1-20 of SEQ ID NO: 2673.

### Tables 18A and 18B

[0594] Tables 18A and 18B provide exemplary 5′ PEgRNAs and components that can be used with any prime editor containing a Cas9 protein capable of recognizing a NGG PAM sequence, wherein N is A, G, C, or T. The PEgRNAs exemplified in Tables 18A and 18B comprise: (a) a spacer comprising at its 3′ end a sequence corresponding to nucleotides 5-20 of sequence number 1019, (b) a gRNA core capable of binding to a Cas9 protein, and (c) an extension arm comprising (i) an editing template and (ii) a primer binding site (PBS) comprising at its 5′ end the sequence corresponding to sequence number 1034.

[0595] The PEgRNA spacer can be, for example, 16-22 nucleotides in length. In some embodiments, the PEgNA spacer is 16-20 nucleotides in length. In some embodiments, the PEgRNA spacer comprises at its 3′ end nucleotides 5-20, 4-20, 3-20, 2-20, or 1-20 of sequence number 1019. In some embodiments, the PEgRNA spacer comprises the sequence of sequence number 1019. In some embodiments, the PEgRNA spacer is 20 nucleotides in length. Any of these spacers exemplified can be referred to as 5′ spacer No. 18.

[0596] The PBS can be, for example, 3 to 19 nucleotides in length. In some embodiments, the PBS is 3 to 17 nucleotides in length and corresponds to sequence number 1020, 1021, 1022, 1023, 1024, 1025, 1026, 1027, 1028, 1029, 1030, 1031, 1032, 1033, or 1034. In some cases, a PBS length of no more than 3 nucleotides less than the PEgRNA spacer length is chosen.

[0597] The 5′ PEgRNAs of Tables 18A and 18B can be used in a dual prime editing system or composition further comprising any suitable 3′ PEgRNA. The prime editing system can be used, e.g., for editing a DMPK gene harboring 50 or more CTG repeats.

[0598] In some embodiments, a prime editing composition comprises a 5′ PEgRNA having sequences or components exemplified in Tables 18A and 18B and a 3′ PEgRNA, wherein the editing templates of the 5′ PEgRNA and the 3′ PEgRNA each comprises a region of complementarity to each other. For example, the editing template of the 5′ PEgRNA can comprise any of the RTT sequences provided in Table 37. The terms “editing template” and “RTT” may be used interchangeably. Each of the RTT sequences in Table 37 is assigned a RTT Pairing number that reflects the complementarity relationship between a 5′ RTT and a 3′ RTT. The 5′ PEgRNA can be used in a dual prime editing system that further comprises a 3′ PEgRNA, e.g., a 3′ PEgRNA having a spacer sequence and a corresponding PBS as exemplified in Tables 20A-36B, wherein the 3′ PEgRNA comprises an editing template comprising a RTT sequence having a region of complementarity to the 5′ RTT. The 3′ RTT can comprise any of the RTT sequences provided in Table 38, wherein the 3′ RTT sequence has the same RTT Pairing number as that of the 5′ RTT. The editing templates of the 5′ PEgRNA and the 3′ PEgRNA can be completely complementary to each other, wherein the 5′ editing template and the 3′ editing template have the same length and perfect complementarity to each other. Alternatively, the 5′ editing template can comprise a region of complementarity to the 3′ editing template, and further comprise a non-complementary region to the 3′ editing template. The 3′ editing template can comprise a region of complementarity to the 5′ editing template, and further comprise a non-complementary region to the 5′ editing template. The non-complementary region can be at the 5′ end or the 3′ end of the editing templates. Contacting the target DMPK gene with the prime editing system can result in deletion of the sequence between the 5′ PEgRNA nick and the 3′ PEgRNA nick (the IND) and insertion of the region of complementarity between the 5′ editing template and the 3′ editing template (the OD), or insertion of the region of complementarity between the 5′ editing template and the 3′ editing template as well as the non-complementarity regions (together referred to as the RD), and hence replace the CTG repeats with the sequence of the OD or the RD. In some embodiments, the 5′ PEgRNA comprises a sequence selected from sequence numbers 1035-1325. In some embodiments, the 5′ PEgRNA comprises the sequence of sequence number 1035 or 1036. In some embodiments, the 5′ PEgRNA comprises a sequence selected from sequence numbers 1037-1291. In some embodiments, the 5′ PEgRNA comprises a sequence selected from sequence numbers 1292-1325. Each of the 5′ PEgRNA is assigned a RTT Pairing number, and can be used in a dual prime editing composition with a 3′ PEgRNA comprising an RTT having the same RTT Pairing number.

[0599] In some embodiments, a prime editing composition comprises a 5′ PEgRNA or component thereof exemplified in Tables 18A and 18B and a 3′ PEgRNA, wherein the editing template of the 5′ PEgRNA comprises a region of identity to the spacer of the 3′ PEgRNA. In some embodiments, the editing template of the 3′ PEgRNA comprises a region of identity to the spacer of the 5′ PEgRNA. In some embodiments, the 5′ editing template comprises a region of complementarity to a region on the second strand of the DMPK gene that is directly 3′ to nucleotide 3 of the search target sequence of the 3′ PEgRNA. In some embodiments, the 3′ editing template comprises a region of complementarity to a region on the first strand of the DMPK gene that is directly 3′ to nucleotide 3 of the search target sequence of the 5′ PEgRNA. For example, the extension arm of the 5′ PEgRNA can comprise an editing template comprising the sequence of any of the RTT sequences provided in Table 39. Each of the RTT sequences in Table 39 is assigned a Pairing 3′ spacer number. The 5′ PEgRNA can be used in a dual prime editing system with a 3′ PEgRNA, wherein the 3′ PEgRNA comprises a spacer that has the Pairing 3′ spacer number assigned to the 5′ RTT in Table 39. Contacting the target DMPK gene with the prime editing system can result in deletion of the sequence between the 5′ PEgRNA nick and the 3′ PEgRNA nick (the IND) without insertion of any exogenous sequence (a “clean deletion”). For example, the 3′ PEgRNA can also comprises a “clean deletion” RTT, e.g., a 3′ RTT selected from Table 40 that is assigned a Pairing 5′ spacer number 18. Alternatively, the 5′ editing template and the 3′ editing template can further comprise a region of complementarity to each other, and the region of complementarity can replace the IND in the DMPK gene. In some embodiments, the 5′ PEgRNA is part of a dual prime editing composition that further comprises a 3′ PEgRNA, wherein the 5′ PEgRNA comprises a RTT comprising a sequence selected from sequence numbers 3459-3461 and 3467-3471, and the 3′ PEgRNA comprises a spacer comprising nucleotides 5-20 of sequence number 1525. In some embodiments, the 5′ PEgRNA is part of a dual prime editing composition that further comprises a 3′ PEgRNA, wherein the 5′ PEgRNA comprises a RTT comprising a sequence selected from sequence numbers 3462-3466, and the 3′ PEgRNA comprises a spacer comprising nucleotides 5-20 of sequence number 2353. In some embodiments, the 5′ PEgRNA is part of a dual prime editing composition that further comprises a 3′ PEgRNA, wherein the 5′ PEgRNA comprises a RTT comprising a sequence selected from sequence numbers 3472-3476, and the 3′ PEgRNA comprises a spacer comprising nucleotides 5-20 of sequence number 1936. In some embodiments, the 5′ PEgRNA is part of a dual prime editing composition that further comprises a 3′ PEgRNA, wherein the 5′ PEgRNA comprises a RTT comprising nucleotides x-40 of sequence number 3647, 3648, 3649, 3650, 3651, 3652, 3653, 3654, 3655, 3656, 3657, 3658, 3659, 3660, 3661, 3662, or 3663, wherein the 3′ PEgRNA comprises a spacer comprising nucleotides 5-20 of sequence number 1900, 1918, 1403, 1936, 2263, 2353, 1503, 2281, 2673, 1525, 2299, 2317, 1864, 1359, 2335, 1882, or 1381 respectively in the same order, and wherein x is any integer from 1 to 31. In some embodiments, the 5′ PEgRNA comprises a sequence selected from sequence numbers 1326-1340 and 3713-3727. Each 5′ PEgRNA is assigned a RTT Pairing number, which corresponds to a Pairing 3′ spacer number in Table 39. The 5′ PEgRNA can be used in a dual prime editing system or composition with a 3′ PEgRNA comprising a spacer of the same Pairing 3′ spacer number. In some embodiments, the 5′ PEgRNA comprises a sequence selected from sequence numbers 1331-1335, and is used in a prime editing system further comprising a 3′ PEgRNA having a spacer comprising nucleotides 5-20, 4-20, 3-20, 2-20, or 1-20 of SEQ ID NO: 2353. In some embodiments, the 5′ PEgRNA comprises a sequence selected from sequence numbers 1336-1340, and is used in a prime editing system further comprising a 3′ PEgRNA having a spacer comprising nucleotides 5-20, 4-20, 3-20, 2-20, or 1-20 of SEQ ID NO: 1525. In some embodiments, the 5′ PEgRNA comprises a sequence selected from sequence numbers 1326-1330 and 3718-3722, and is used in a prime editing system further comprising a 3′ PEgRNA having a spacer comprising nucleotides 5-20, 4-20, 3-20, 2-20, or 1-20 of SEQ ID NO: 1936. In some embodiments, the 5′ PEgRNA comprises a sequence selected from sequence numbers 3713-3717, and is used in a prime editing system further comprising a 3′ PEgRNA having a spacer comprising nucleotides 5-20, 4-20, 3-20, 2-20, or 1-20 of SEQ ID NO: 1900. In some embodiments, the 5′ PEgRNA comprises a sequence selected from sequence numbers 3723-3727, and is used in a prime editing system further comprising a 3′ PEgRNA having a spacer comprising nucleotides 5-20, 4-20, 3-20, 2-20, or 1-20 of SEQ ID NO: 2673.

### Tables 27A and 27B

[0600] Tables 27A and 27B provide exemplary 3′ PEgRNAs and components that can be used with any prime editor containing a Cas9 protein capable of recognizing a NGG PAM sequence, wherein N is A, G, C, or T. The PEgRNAs exemplified in Tables 27A and 27B comprise: (a) a spacer comprising at its 3′ end a sequence corresponding to nucleotides 5-20 of sequence number 1900, (b) a gRNA core capable of binding to a Cas9 protein, and (c) an extension arm comprising (i) an editing template and (ii) a primer binding site (PBS) comprising at its 5′ end the sequence corresponding to sequence number 1915.

[0601] The PEgRNA spacer can be, for example, 16-22 nucleotides in length. In some embodiments, the PEgNA spacer is 16-20 nucleotides in length. In some embodiments, the PEgRNA spacer comprises at its 3′ end nucleotides 5-20, 4-20, 3-20, 2-20, or 1-20 of sequence number 1900. In some embodiments, the PEgRNA spacer comprises the sequence of sequence number 1900. In some embodiments, the PEgRNA spacer is 20 nucleotides in length. Any of these spacers exemplified can be referred to as 3′ spacer No. 8.

[0602] The PBS can be, for example, 3 to 19 nucleotides in length. In some embodiments, the PBS is 3 to 17 nucleotides in length and corresponds to sequence number 1901, 1902, 1903, 1904, 1905, 1906, 1907, 1908, 1909, 1910, 1911, 1912, 1913, 1914, or 1915. In some cases, a PBS length of no more than 3 nucleotides less than the PEgRNA spacer length is chosen.

[0603] The 3′ PEgRNAs of Tables 27A and 27B can be used in a dual prime editing system or composition further comprising any suitable 5′ PEgRNA. The prime editing system can be used, e.g., for editing a DMPK gene harboring 50 or more CTG repeats.

[0604] In some embodiments, a prime editing composition comprises a 3′ PEgRNA having sequences or components exemplified in Tables 27A and 27B and a 5′ PEgRNA, wherein the editing templates of the 3′ PEgRNA and the 5′ PEgRNA each comprises a region of complementarity to each other. For example, the editing template of the 3′ PEgRNA can comprise any of the RTT sequences provided in Table 38. The terms “editing template” and “RTT” may be used interchangeably. Each of the RTT sequences in Table 38 is assigned a RTT Pairing number that reflects the complementarity relationship between a 5′ RTT and a 3′ RTT. The 3′ PEgRNA can be used in a dual prime editing system that further comprises a 5′ PEgRNA, e.g., a 5′ PEgRNA having a spacer sequence and a corresponding PBS as exemplified in Tables 1A-19B, wherein the 5′ PEgRNA comprises an editing template comprising a RTT sequence having a region of complementarity to the 3′ RTT. The 5′ RTT can comprise any of the RTT sequences provided in Table 37, wherein the 5′ RTT sequence has the same RTT Pairing number as that of the 3′ RTT. The editing templates of the 5′ PEgRNA and the 3′ PEgRNA can be completely complementary to each other, wherein the 5′ editing template and the 3′ editing template have the same length and perfect complementarity to each other. Alternatively, the 5′ editing template can comprise a region of complementarity to the 3′ editing template, and further comprise a non-complementary region to the 3′ editing template. The 3′ editing template can comprise a region of complementarity to the 5′ editing template, and further comprise a non-complementary region to the 5′ editing template. The non-complementary region can be at the 5′ end or the 3′ end of the editing templates. Contacting the target DMPK gene with the prime editing system can result in deletion of the sequence between the 5′ PEgRNA nick and the 3′ PEgRNA nick (the IND) and insertion of the region of complementarity between the 5′ editing template and the 3′ editing template (the OD), or insertion of the region of complementarity between the 5′ editing template and the 3′ editing template as well as the non-complementarity regions (together referred to as the RD), and hence replace the CTG repeats with the sequence of the OD or the RD. In some embodiments, the 3′ PEgRNA comprises the sequence of sequence number 1916 or 1917. Each of the 3′ PEgRNA is assigned a RTT Pairing number, and can be used in a dual prime editing composition with a 5′ PEgRNA comprising an RTT having the same RTT Pairing number.

[0605] In some embodiments, a prime editing composition comprises a 3′ PEgRNA or component thereof exemplified in Tables 27A and 27B and a 5′ PEgRNA, wherein the editing template of the 3′ PEgRNA comprises a region of identity to the spacer of the 5′ PEgRNA. In some embodiments, the editing template of the 5′ PEgRNA comprises a region of identity to the spacer of the 3′ PEgRNA. In some embodiments, the 3′ editing template comprises a region of complementarity to a region on the first strand of the DMPK gene that is directly 3′ to nucleotide 3 of the search target sequence of the 5′ PEgRNA. In some embodiments, the 5′ editing template comprises a region of complementarity to a region on the second strand of the DMPK gene that is directly 3′ to nucleotide 3 of the search target sequence of the 3′ PEgRNA. For example, the extension arm of the 3′ PEgRNA can comprise an editing template comprising the sequence of any of the RTT sequences provided in Table 40. Each of the RTT sequences in Table 40 is assigned a Pairing 5′ spacer number. The 3′ PEgRNA can be used in a dual prime editing system with a 5′ PEgRNA, wherein the 5′ PEgRNA comprises a spacer that has the Pairing 5′ spacer number assigned to the 3′ RTT in Table 40. Contacting the target DMPK gene with the prime editing system can result in deletion of the sequence between the 5′ PEgRNA nick and the 3′ PEgRNA nick (the IND) without insertion of any exogenous sequence (a “clean deletion”). For example, the 5′ PEgRNA can also comprises a “clean deletion” RTT, e.g., a 5′ RTT selected from Table 39 that is assigned a Pairing 3′ spacer number 8. Alternatively, the 5′ editing template and the 3′ editing template can further comprise a region of complementarity to each other, and the region of complementarity can replace the IND in the DMPK gene. In some embodiments, the 3′ PEgRNA is part of a dual prime editing composition that further comprises a 5′ PEgRNA, wherein the 3′ PEgRNA comprises a RTT comprising a sequence selected from sequence numbers 3477-3479, and the 5′ PEgRNA comprises a spacer comprising nucleotides 5-20 of sequence number 484. In some embodiments, the 3′ PEgRNA is part of a dual prime editing composition that further comprises a 5′ PEgRNA, wherein the 3′ PEgRNA comprises a RTT comprising a sequence selected from sequence numbers 3480-3484, and the 5′ PEgRNA comprises a spacer comprising nucleotides 5-20 of sequence number 77. In some embodiments, the 3′ PEgRNA is part of a dual prime editing composition that further comprises a 5′ PEgRNA, wherein the 3′ PEgRNA comprises a RTT comprising a sequence selected from sequence numbers 3485-3489, and the 5′ PEgRNA comprises a spacer comprising nucleotides 5-20 of sequence number 590. In some embodiments, the 3′ PEgRNA is part of a dual prime editing composition that further comprises a 5′ PEgRNA, wherein the 3′ PEgRNA comprises a RTT comprising a sequence selected from sequence numbers 3490-3494, and the 5′ PEgRNA comprises a spacer comprising nucleotides 5-20 of sequence number 1019. In some embodiments, the 3′ PEgRNA is part of a dual prime editing composition that further comprises a 5′ PEgRNA, wherein the 3′ PEgRNA comprises a RTT comprising nucleotides x-40 of sequence number 3664, 3665, 3666, 3667, 3668, 3669, 3670, 3671, 3672, 3673, 3674, 3675, 3676, 3677, 3678, 3679, 3680, 3681, or 3682, wherein the 5′ PEgRNA comprises a spacer comprising nucleotides 5-20 of sequence number 518, 536, 554, 572, 590, 39, 912, 929, 947, 965, 983, 1001, 1019, 1341, 20, 77, 484, 58, or 1 respectively in the same order, and wherein x is any integer from 1 to 31. In some embodiments, the 3′ PEgRNA comprises a sequence selected from sequence numbers 3728-3742. Each 3′ PEgRNA is assigned a RTT Pairing number, which corresponds to a Pairing 5′ spacer number in Table 40. The 3′ PEgRNA can be used in a dual prime editing system or composition with a 5′ PEgRNA comprising a spacer of the same Pairing 5′ spacer number. In some embodiments, the 3′ PEgRNA comprises a sequence selected from sequence numbers 3733-3737, and is used in a prime editing system further comprising a 5′ PEgRNA having a spacer comprising nucleotides 5-20, 4-20, 3-20, 2-20, or 1-20 of SEQ ID NO: 77. In some embodiments, the 3′ PEgRNA comprises a sequence selected from sequence numbers 3728-3732, and is used in a prime editing system further comprising a 5′ PEgRNA having a spacer comprising nucleotides 5-20, 4-20, 3-20, 2-20, or 1-20 of SEQ ID NO: 1019. In some embodiments, the 3′ PEgRNA comprises a sequence selected from sequence numbers 3738-3742, and is used in a prime editing system further comprising a 5′ PEgRNA having a spacer comprising nucleotides 5-20, 4-20, 3-20, 2-20, or 1-20 of SEQ ID NO: 536.

### Tables 29A and 29B

[0606] Tables 29A and 29B provide exemplary 3′ PEgRNAs and components that can be used with any prime editor containing a Cas9 protein capable of recognizing a NGG PAM sequence, wherein N is A, G, C, or T. The PEgRNAs exemplified in Tables 29A and 29B comprise: (a) a spacer comprising at its 3′ end a sequence corresponding to nucleotides 5-20 of sequence number 1936, (b) a gRNA core capable of binding to a Cas9 protein, and (c) an extension arm comprising (i) an editing template and (ii) a primer binding site (PBS) comprising at its 5′ end the sequence corresponding to sequence number 1951.

[0607] The PEgRNA spacer can be, for example, 16-22 nucleotides in length. In some embodiments, the PEgNA spacer is 16-20 nucleotides in length. In some embodiments, the PEgRNA spacer comprises at its 3′ end nucleotides 5-20, 4-20, 3-20, 2-20, or 1-20 of sequence number 1936. In some embodiments, the PEgRNA spacer comprises the sequence of sequence number 1936. In some embodiments, the PEgRNA spacer is 20 nucleotides in length. Any of these spacers exemplified can be referred to as 3′ spacer No. 10.

[0608] The PBS can be, for example, 3 to 19 nucleotides in length. In some embodiments, the PBS is 3 to 17 nucleotides in length and corresponds to sequence number 1937, 1938, 1939, 1940, 1941, 1942, 1943, 1944, 1945, 1946, 1947, 1948, 1949, 1950, or 1951. In some cases, a PBS length of no more than 3 nucleotides less than the PEgRNA spacer length is chosen.

[0609] The 3′ PEgRNAs of Tables 29A and 29B can be used in a dual prime editing system or composition further comprising any suitable 5′ PEgRNA. The prime editing system can be used, e.g., for editing a DMPK gene harboring 50 or more CTG repeats.

[0610] In some embodiments, a prime editing composition comprises a 3′ PEgRNA having sequences or components exemplified in Tables 29A and 29B and a 5′ PEgRNA, wherein the editing templates of the 3′ PEgRNA and the 5′ PEgRNA each comprises a region of complementarity to each other. For example, the editing template of the 3′ PEgRNA can comprise any of the RTT sequences provided in Table 38. The terms “editing template” and “RTT” may be used interchangeably. Each of the RTT sequences in Table 38 is assigned a RTT Pairing number that reflects the complementarity relationship between a 5′ RTT and a 3′ RTT. The 3′ PEgRNA can be used in a dual prime editing system that further comprises a 5′ PEgRNA, e.g., a 5′ PEgRNA having a spacer sequence and a corresponding PBS as exemplified in Tables 1A-19B, wherein the 5′ PEgRNA comprises an editing template comprising a RTT sequence having a region of complementarity to the 3′ RTT. The 5′ RTT can comprise any of the RTT sequences provided in Table 37, wherein the 5′ RTT sequence has the same RTT Pairing number as that of the 3′ RTT. The editing templates of the 5′ PEgRNA and the 3′ PEgRNA can be completely complementary to each other, wherein the 5′ editing template and the 3′ editing template have the same length and perfect complementarity to each other. Alternatively, the 5′ editing template can comprise a region of complementarity to the 3′ editing template, and further comprise a non-complementary region to the 3′ editing template. The 3′ editing template can comprise a region of complementarity to the 5′ editing template, and further comprise a non-complementary region to the 5′ editing template. The non-complementary region can be at the 5′ end or the 3′ end of the editing templates. Contacting the target DMPK gene with the prime editing system can result in deletion of the sequence between the 5′ PEgRNA nick and the 3′ PEgRNA nick (the IND) and insertion of the region of complementarity between the 5′ editing template and the 3′ editing template (the OD), or insertion of the region of complementarity between the 5′ editing template and the 3′ editing template as well as the non-complementarity regions (together referred to as the RD), and hence replace the CTG repeats with the sequence of the OD or the RD. In some embodiments, the 3′ PEgRNA comprises a sequence selected from sequence numbers 1952-2247. In some embodiments, the 3′ PEgRNA comprises a sequence selected from sequence numbers 1952-1961. In some embodiments, the 3′ PEgRNA comprises a sequence selected from sequence numbers 1962-2216. In some embodiments, the 3′ PEgRNA comprises a sequence selected from sequence numbers 2217-2247. Each of the 3′ PEgRNA is assigned a RTT Pairing number, and can be used in a dual prime editing composition with a 5′ PEgRNA comprising an RTT having the same RTT Pairing number.

[0611] In some embodiments, a prime editing composition comprises a 3′ PEgRNA or component thereof exemplified in Tables 29A and 29B and a 5′ PEgRNA, wherein the editing template of the 3′ PEgRNA comprises a region of identity to the spacer of the 5′ PEgRNA. In some embodiments, the editing template of the 5′ PEgRNA comprises a region of identity to the spacer of the 3′ PEgRNA. In some embodiments, the 3′ editing template comprises a region of complementarity to a region on the first strand of the DMPK gene that is directly 3′ to nucleotide 3 of the search target sequence of the 5′ PEgRNA. In some embodiments, the 5′ editing template comprises a region of complementarity to a region on the second strand of the DMPK gene that is directly 3′ to nucleotide 3 of the search target sequence of the 3′ PEgRNA. For example, the extension arm of the 3′ PEgRNA can comprise an editing template comprising the sequence of any of the RTT sequences provided in Table 40. Each of the RTT sequences in Table 40 is assigned a Pairing 5′ spacer number. The 3′ PEgRNA can be used in a dual prime editing system with a 5′ PEgRNA, wherein the 5′ PEgRNA comprises a spacer that has the Pairing 5′ spacer number assigned to the 3′ RTT in Table 40. Contacting the target DMPK gene with the prime editing system can result in deletion of the sequence between the 5′ PEgRNA nick and the 3′ PEgRNA nick (the IND) without insertion of any exogenous sequence (a “clean deletion”). For example, the 5′ PEgRNA can also comprises a “clean deletion” RTT, e.g., a 5′ RTT selected from Table 39 that is assigned a Pairing 3′ spacer number 10. Alternatively, the 5′ editing template and the 3′ editing template can further comprise a region of complementarity to each other, and the region of complementarity can replace the IND in the DMPK gene. In some embodiments, the 3′ PEgRNA is part of a dual prime editing composition that further comprises a 5′ PEgRNA, wherein the 3′ PEgRNA comprises a RTT comprising a sequence selected from sequence numbers 3477-3479, and the 5′ PEgRNA comprises a spacer comprising nucleotides 5-20 of sequence number 484. In some embodiments, the 3′ PEgRNA is part of a dual prime editing composition that further comprises a 5′ PEgRNA, wherein the 3′ PEgRNA comprises a RTT comprising a sequence selected from sequence numbers 3480-3484, and the 5′ PEgRNA comprises a spacer comprising nucleotides 5-20 of sequence number 77. In some embodiments, the 3′ PEgRNA is part of a dual prime editing composition that further comprises a 5′ PEgRNA, wherein the 3′ PEgRNA comprises a RTT comprising a sequence selected from sequence numbers 3485-3489, and the 5′ PEgRNA comprises a spacer comprising nucleotides 5-20 of sequence number 590. In some embodiments, the 3′ PEgRNA is part of a dual prime editing composition that further comprises a 5′ PEgRNA, wherein the 3′ PEgRNA comprises a RTT comprising a sequence selected from sequence numbers 3490-3494, and the 5′ PEgRNA comprises a spacer comprising nucleotides 5-20 of sequence number 1019. In some embodiments, the 3′ PEgRNA is part of a dual prime editing composition that further comprises a 5′ PEgRNA, wherein the 3′ PEgRNA comprises a RTT comprising nucleotides x-40 of sequence number 3664, 3665, 3666, 3667, 3668, 3669, 3670, 3671, 3672, 3673, 3674, 3675, 3676, 3677, 3678, 3679, 3680, 3681, or 3682, wherein the 5′ PEgRNA comprises a spacer comprising nucleotides 5-20 of sequence number 518, 536, 554, 572, 590, 39, 912, 929, 947, 965, 983, 1001, 1019, 1341, 20, 77, 484, 58, or 1 respectively in the same order, and wherein x is any integer from 1 to 31. In some embodiments, the 3′ PEgRNA comprises a sequence selected from sequence numbers 2248-2262 and 3743-3757. Each 3′ PEgRNA is assigned a RTT Pairing number, which corresponds to a Pairing 5′ spacer number in Table 40. The 3′ PEgRNA can be used in a dual prime editing system or composition with a 5′ PEgRNA comprising a spacer of the same Pairing 5′ spacer number. In some embodiments, the 3′ PEgRNA comprises a sequence selected from sequence numbers 2248-2252 and 3748-3752, and is used in a prime editing system further comprising a 5′ PEgRNA having a spacer comprising nucleotides 5-20, 4-20, 3-20, 2-20, or 1-20 of SEQ ID NO: 77. In some embodiments, the 3′ PEgRNA comprises a sequence selected from sequence numbers 2258-2262, and is used in a prime editing system further comprising a 5′ PEgRNA having a spacer comprising nucleotides 5-20, 4-20, 3-20, 2-20, or 1-20 of SEQ ID NO: 590. In some embodiments, the 3′ PEgRNA comprises a sequence selected from sequence numbers 2253-2257 and 3743-3747, and is used in a prime editing system further comprising a 5′ PEgRNA having a spacer comprising nucleotides 5-20, 4-20, 3-20, 2-20, or 1-20 of SEQ ID NO: 1019. In some embodiments, the 3′ PEgRNA comprises a sequence selected from sequence numbers 3753-3757, and is used in a prime editing system further comprising a 5′ PEgRNA having a spacer comprising nucleotides 5-20, 4-20, 3-20, 2-20, or 1-20 of SEQ ID NO: 536.

### Tables 36A and 36B

[0612] Tables 36A and 36B provide exemplary 3′ PEgRNAs and components that can be used with any prime editor containing a Cas9 protein capable of recognizing a NGG PAM sequence, wherein N is A, G, C, or T. The PEgRNAs exemplified in Tables 36A and 36B comprise: (a) a spacer comprising at its 3′ end a sequence corresponding to nucleotides 5-20 of sequence number 2673, (b) a gRNA core capable of binding to a Cas9 protein, and (c) an extension arm comprising (i) an editing template and (ii) a primer binding site (PBS) comprising at its 5′ end the sequence corresponding to sequence number 2688.

[0613] The PEgRNA spacer can be, for example, 16-22 nucleotides in length. In some embodiments, the PEgNA spacer is 16-20 nucleotides in length. In some embodiments, the PEgRNA spacer comprises at its 3′ end nucleotides 5-20, 4-20, 3-20, 2-20, or 1-20 of sequence number 2673. In some embodiments, the PEgRNA spacer comprises the sequence of sequence number 2673. In some embodiments, the PEgRNA spacer is 20 nucleotides in length. Any of these spacers exemplified can be referred to as 3′ spacer No. 17.

[0614] The PBS can be, for example, 3 to 19 nucleotides in length. In some embodiments, the PBS is 3 to 17 nucleotides in length and corresponds to sequence number 2674, 2675, 2676, 2677, 2678, 2679, 2680, 2681, 2682, 2683, 2684, 2685, 2686, 2687, or 2688. In some cases, a PBS length of no more than 3 nucleotides less than the PEgRNA spacer length is chosen.

[0615] The 3′ PEgRNAs of Tables 36A and 36B can be used in a dual prime editing system or composition further comprising any suitable 5′ PEgRNA. The prime editing system can be used, e.g., for editing a DMPK gene harboring 50 or more CTG repeats.

[0616] In some embodiments, a prime editing composition comprises a 3′ PEgRNA having sequences or components exemplified in Tables 36A and 36B and a 5′ PEgRNA, wherein the editing templates of the 3′ PEgRNA and the 5′ PEgRNA each comprises a region of complementarity to each other. For example, the editing template of the 3′ PEgRNA can comprise any of the RTT sequences provided in Table 38. The terms “editing template” and “RTT” may be used interchangeably. Each of the RTT sequences in Table 38 is assigned a RTT Pairing number that reflects the complementarity relationship between a 5′ RTT and a 3′ RTT. The 3′ PEgRNA can be used in a dual prime editing system that further comprises a 5′ PEgRNA, e.g., a 5′ PEgRNA having a spacer sequence and a corresponding PBS as exemplified in Tables 1A-19B, wherein the 5′ PEgRNA comprises an editing template comprising a RTT sequence having a region of complementarity to the 3′ RTT. The 5′ RTT can comprise any of the RTT sequences provided in Table 37, wherein the 5′ RTT sequence has the same RTT Pairing number as that of the 3′ RTT. The editing templates of the 5′ PEgRNA and the 3′ PEgRNA can be completely complementary to each other, wherein the 5′ editing template and the 3′ editing template have the same length and perfect complementarity to each other. Alternatively, the 5′ editing template can comprise a region of complementarity to the 3′ editing template, and further comprise a non-complementary region to the 3′ editing template. The 3′ editing template can comprise a region of complementarity to the 5′ editing template, and further comprise a non-complementary region to the 5′ editing template. The non-complementary region can be at the 5′ end or the 3′ end of the editing templates. Contacting the target DMPK gene with the prime editing system can result in deletion of the sequence between the 5′ PEgRNA nick and the 3′ PEgRNA nick (the IND) and insertion of the region of complementarity between the 5′ editing template and the 3′ editing template (the OD), or insertion of the region of complementarity between the 5′ editing template and the 3′ editing template as well as the non-complementarity regions (together referred to as the RD), and hence replace the CTG repeats with the sequence of the OD or the RD. In some embodiments, the 3′ PEgRNA comprises the sequence of sequence number 2689 or 2690. Each of the 3′ PEgRNA is assigned a RTT Pairing number, and can be used in a dual prime editing composition with a 5′ PEgRNA comprising an RTT having the same RTT Pairing number.

[0617] In some embodiments, a prime editing composition comprises a 3′ PEgRNA or component thereof exemplified in Tables 36A and 36B and a 5′ PEgRNA, wherein the editing template of the 3′ PEgRNA comprises a region of identity to the spacer of the 5′ PEgRNA. In some embodiments, the editing template of the 5′ PEgRNA comprises a region of identity to the spacer of the 3′ PEgRNA. In some embodiments, the 3′ editing template comprises a region of complementarity to a region on the first strand of the DMPK gene that is directly 3′ to nucleotide 3 of the search target sequence of the 5′ PEgRNA. In some embodiments, the 5′ editing template comprises a region of complementarity to a region on the second strand of the DMPK gene that is directly 3′ to nucleotide 3 of the search target sequence of the 3′ PEgRNA. For example, the extension arm of the 3′ PEgRNA can comprise an editing template comprising the sequence of any of the RTT sequences provided in Table 40. Each of the RTT sequences in Table 40 is assigned a Pairing 5′ spacer number. The 3′ PEgRNA can be used in a dual prime editing system with a 5′ PEgRNA, wherein the 5′ PEgRNA comprises a spacer that has the Pairing 5′ spacer number assigned to the 3′ RTT in Table 40. Contacting the target DMPK gene with the prime editing system can result in deletion of the sequence between the 5′ PEgRNA nick and the 3′ PEgRNA nick (the IND) without insertion of any exogenous sequence (a “clean deletion”). For example, the 5′ PEgRNA can also comprises a “clean deletion” RTT, e.g., a 5′ RTT selected from Table 39 that is assigned a Pairing 3′ spacer number 17. Alternatively, the 5′ editing template and the 3′ editing template can further comprise a region of complementarity to each other, and the region of complementarity can replace the IND in the DMPK gene. In some embodiments, the 3′ PEgRNA is part of a dual prime editing composition that further comprises a 5′ PEgRNA, wherein the 3′ PEgRNA comprises a RTT comprising a sequence selected from sequence numbers 3477-3479, and the 5′ PEgRNA comprises a spacer comprising nucleotides 5-20 of sequence number 484. In some embodiments, the 3′ PEgRNA is part of a dual prime editing composition that further comprises a 5′ PEgRNA, wherein the 3′ PEgRNA comprises a RTT comprising a sequence selected from sequence numbers 3480-3484, and the 5′ PEgRNA comprises a spacer comprising nucleotides 5-20 of sequence number 77. In some embodiments, the 3′ PEgRNA is part of a dual prime editing composition that further comprises a 5′ PEgRNA, wherein the 3′ PEgRNA comprises a RTT comprising a sequence selected from sequence numbers 3485-3489, and the 5′ PEgRNA comprises a spacer comprising nucleotides 5-20 of sequence number 590. In some embodiments, the 3′ PEgRNA is part of a dual prime editing composition that further comprises a 5′ PEgRNA, wherein the 3′ PEgRNA comprises a RTT comprising a sequence selected from sequence numbers 3490-3494, and the 5′ PEgRNA comprises a spacer comprising nucleotides 5-20 of sequence number 1019. In some embodiments, the 3′ PEgRNA is part of a dual prime editing composition that further comprises a 5′ PEgRNA, wherein the 3′ PEgRNA comprises a RTT comprising nucleotides x-40 of sequence number 3664, 3665, 3666, 3667, 3668, 3669, 3670, 3671, 3672, 3673, 3674, 3675, 3676, 3677, 3678, 3679, 3680, 3681, or 3682, wherein the 5′ PEgRNA comprises a spacer comprising nucleotides 5-20 of sequence number 518, 536, 554, 572, 590, 39, 912, 929, 947, 965, 983, 1001, 1019, 1341, 20, 77, 484, 58, or 1 respectively in the same order, and wherein x is any integer from 1 to 31. In some embodiments, the 3′ PEgRNA comprises a sequence selected from sequence numbers 3758-3772. Each 3′ PEgRNA is assigned a RTT Pairing number, which corresponds to a Pairing 5′ spacer number in Table 40. The 3′ PEgRNA can be used in a dual prime editing system or composition with a 5′ PEgRNA comprising a spacer of the same Pairing 5′ spacer number. In some embodiments, the 3′ PEgRNA comprises a sequence selected from sequence numbers 3763-3767, and is used in a prime editing system further comprising a 5′ PEgRNA having a spacer comprising nucleotides 5-20, 4-20, 3-20, 2-20, or 1-20 of SEQ ID NO: 77. In some embodiments, the 3′ PEgRNA comprises a sequence selected from sequence numbers 3758-3762, and is used in a prime editing system further comprising a 5′ PEgRNA having a spacer comprising nucleotides 5-20, 4-20, 3-20, 2-20, or 1-20 of SEQ ID NO: 1019. In some embodiments, the 3′ PEgRNA comprises a sequence selected from sequence numbers 3768-3772, and is used in a prime editing system further comprising a 5′ PEgRNA having a spacer comprising nucleotides 5-20, 4-20, 3-20, 2-20, or 1-20 of SEQ ID NO: 536.

### Tables 1A and 1B

[0618] Tables 1A and 1B provide exemplary 5′ PEgRNAs and components that can be used with any prime editor containing a Cas9 protein capable of recognizing a NGG PAM sequence, wherein N is A, G, C, or T. The PEgRNAs exemplified in Tables 1A and 1B comprise: (a) a spacer comprising at its 3′ end a sequence corresponding to nucleotides 5-20 of sequence number 1, (b) a gRNA core capable of binding to a Cas9 protein, and (c) an extension arm comprising (i) an editing template and (ii) a primer binding site (PBS) comprising at its 5′ end the sequence corresponding to sequence number 16.

[0619] The PEgRNA spacer can be, for example, 16-22 nucleotides in length. In some embodiments, the PEgNA spacer is 16-20 nucleotides in length. In some embodiments, the PEgRNA spacer comprises nucleotides 5-20, 4-20, 3-20, 2-20, or 1-20 of sequence number 1. In some embodiments, the PEgRNA spacer comprises the sequence of sequence number 1. In some embodiments, the PEgRNA spacer is 20 nucleotides in length. Any of these spacers exemplified can be referred to as 5′ spacer No. 1.

[0620] The PBS can be, for example, 3 to 19 nucleotides in length. In some embodiments, the PBS is 3 to 17 nucleotides in length and corresponds to a PBS sequence in Table 1A. In some cases, a PBS length of no more than 3 nucleotides less than the PEgRNA spacer length is chosen.

[0621] The 5′ PEgRNAs of Tables 1A and 1B can be used in a dual prime editing system or composition further comprising any suitable 3′ PEgRNA. The prime editing system can be used, e.g., for editing a DMPK gene harboring 50 or more CTG repeats in the DMPK gene.

[0622] In some embodiments, a prime editing composition comprises a 5′ PEgRNA or component thereof exemplified in Tables 1A and 1B and a 3′ PEgRNA, wherein the editing template of the 5′ PEgRNA and the 3′ PEgRNA each comprises a region of complementarity to each other. For example, the editing template of the 5′ PEgRNA can comprise any of the RTT sequences provided in Table 37. The terms editing template and RTT may be used interchangeably. Each of the RTT sequences in Table 37 is assigned a RTT pairing number that reflects the complementarity relationship between a 5′ RTT and a 3′ RTT. The 5′ PEgRNA can be used in a dual prime editing system that further comprises a 3′ PEgRNA, e.g., a 3′ PEgRNA having a spacer sequence and a corresponding PBS as exemplified in Tables 20A-36B, wherein the 3′ PEgRNA comprises an editing template comprising a RTT sequence having a region of complementarity to the 5′ RTT. The 3′ RTT can comprise any of the RTT sequences provided in Table 38, wherein the 3′ RTT sequence has the same RTT Pairing number as that of the 5′ RTT. The editing template of the 5′ PEgRNA and the 3′ PEgRNA can be completely complementary to each other, wherein the 5′ editing template and the 3′ editing template have the same length and perfect complementarity to each other. Alternatively, the 5′ editing template can comprise a region of complementarity to the 3′ editing template, and further comprise a non-complementary region to the 3′ editing template. The 3′ editing template can comprise a region of complementarity to the 5′ editing template, and further comprise a non-complementary region to the 5′ editing template. The non-complementary region can be at the 5′ end or the 3′ end of the editing templates. Contacting the target DMPK gene with the prime editing system can result in deletion of the sequence between the 5′ PEgRNA nick and the 3′ PEgRNA nick (the IND) and insertion of the region of complementarity between the 5′ editing template and the 3′ editing template (the OD), or insertion of the region of complementarity between the 5′ editing template and the 3′ editing template as well as the non-complementarity regions (the RD), and hence replace the CTG expansion with the sequence of the OD or the RD. Each of the 5′ PEgRNA is assigned a RTT pairing number, and can be used in a dual prime editing composition with a 3′ PEgRNA comprising an RTT having the same RTT pairing number.

[0623] In some embodiments, a prime editing composition comprises a 5′ PEgRNA or component thereof exemplified in Tables 1A and 1B and a 3′ PEgRNA, wherein the editing template of the 5′ PEgRNA comprises a region of identity to the spacer of the 3′ PEgRNA. In some embodiments, the editing template of the 3′ PEgRNA comprises a region of identity to the spacer of the 5′ PEgRNA. In some embodiments, the 5′ editing template comprises a region of complementarity to a region on the second strand of the DMPK gene that is directly 3′ to nucleotide 3 of the search target sequence of the 3′ PEgRNA. In some embodiments, the 3′ editing template comprises a region of complementarity to a region on the first strand of the DMPK gene that is directly 3′ to nucleotide 3 of the search target sequence of the 5′ PEgRNA. For example, the extension arm of the 5′ PEgRNA can comprise an editing template comprising the sequence of any of the RTT sequences provided in Table 39. Each of the RTT sequences in Table 39 is assigned a pairing 3′ spacer number. The 5′ PEgRNA can be used in a dual prime editing system with a 3′ PEgRNA, wherein the 3′ PEgRNA comprises a spacer that has the Pairing 3′ spacer number assigned to the 5′ RTT in Table 39. Contacting the target DMPK gene with the prime editing system can result in deletion of the sequence between the 5′ PEgRNA nick and the 3′ PEgRNA nick (the IND) without insertion of any exogenous sequence (a “clean deletion”). Alternatively, the 5′ editing template and the 3′ editing template can further comprise a region of complementarity to each other, and the region of complementarity can replace the IND in the DMPK gene. For example, in some embodiments, the 5′ PEgRNA is part of a dual prime editing composition that further comprises a 3′ PEgRNA, wherein the 5′ PEgRNA comprises a RTT comprising a sequence selected from sequence numbers 3459-3461 and 3467-3471, and the 3′ PEgRNA comprises a spacer comprising nucleotides 5-20 of sequence number 1525. In some embodiments, the 5′ PEgRNA is part of a dual prime editing composition that further comprises a 3′ PEgRNA, wherein the 5′ PEgRNA comprises a RTT comprising a sequence selected from sequence numbers 3462-3466, and the 3′ PEgRNA comprises a spacer comprising nucleotides 5-20 of sequence number 2353. In some embodiments, the 5′ PEgRNA is part of a dual prime editing composition that further comprises a 3′ PEgRNA, wherein the 5′ PEgRNA comprises a RTT comprising a sequence selected from sequence numbers 3472-3476, and the 3′ PEgRNA comprises a spacer comprising nucleotides 5-20 of sequence number 1936. In some embodiments, the 5′ PEgRNA is part of a dual prime editing composition that further comprises a 3′ PEgRNA, wherein the 5′ PEgRNA comprises a RTT comprising nucleotides x-40 of sequence number 3647, 3648, 3649, 3650, 3651, 3652, 3653, 3654, 3655, 3656, 3657, 3658, 3659, 3660, 3661, 3662, or 3663, wherein the 3′ PEgRNA comprises a spacer comprising nucleotides 5-20 of sequence number 1900, 1918, 1403, 1936, 2263, 2353, 1503, 2281, 2673, 1525, 2299, 2317, 1864, 1359, 2335, 1882, or 1381 respectively in the same order, and wherein x is any integer from 1 to 31. Preferably, the 3′ PEgRNA comprises a “clean deletion” RTT, for example, an RTT selected from Table 40 that has a Pairing 5′ spacer number that is 1. Each 5′ PEgRNA is assigned a RTT pairing number, which corresponds to a pairing 3′ spacer number in Table 39. The 5′ PEgRNA can be used in a dual prime editing system or composition with a 3′ PEgRNA comprising a spacer of the same pairing 3′ spacer number.

### Tables 2A and 2B

[0624] Tables 2A and 2B provide exemplary 5′ PEgRNAs and components that can be used with any prime editor containing a Cas9 protein capable of recognizing a NGG PAM sequence, wherein N is A, G, C, or T. The PEgRNAs exemplified in Tables 2A and 2B comprise: (a) a spacer comprising at its 3′ end a sequence corresponding to nucleotides 5-20 of sequence number 20, (b) a gRNA core capable of binding to a Cas9 protein, and (c) an extension arm comprising (i) an editing template and (ii) a primer binding site (PBS) comprising at its 5′ end the sequence corresponding to sequence number 35.

[0625] The PEgRNA spacer can be, for example, 16-22 nucleotides in length. In some embodiments, the PEgNA spacer is 16-20 nucleotides in length. In some embodiments, the PEgRNA spacer comprises nucleotides 5-20, 4-20, 3-20, 2-20, or 1-20 of sequence number 20. In some embodiments, the PEgRNA spacer comprises the sequence of sequence number 20. In some embodiments, the PEgRNA spacer is 20 nucleotides in length. Any of these spacers exemplified can be referred to as 5′ spacer No. 2.

[0626] The PBS can be, for example, 3 to 19 nucleotides in length. In some embodiments, the PBS is 3 to 17 nucleotides in length and corresponds to a PBS sequence in Table 2A. In some cases, a PBS length of no more than 3 nucleotides less than the PEgRNA spacer length is chosen.

[0627] The 5′ PEgRNAs of Tables 2A and 2B can be used in a dual prime editing system or composition further comprising any suitable 3′ PEgRNA. The prime editing system can be used, e.g., for editing a DMPK gene harboring 50 or more CTG repeats in the DMPK gene.

[0628] In some embodiments, a prime editing composition comprises a 5′ PEgRNA or component thereof exemplified in Tables 2A and 2B and a 3′ PEgRNA, wherein the editing template of the 5′ PEgRNA and the 3′ PEgRNA each comprises a region of complementarity to each other. For example, the editing template of the 5′ PEgRNA can comprise any of the RTT sequences provided in Table 37. The terms editing template and RTT may be used interchangeably. Each of the RTT sequences in Table 37 is assigned a RTT pairing number that reflects the complementarity relationship between a 5′ RTT and a 3′ RTT. The 5′ PEgRNA can be used in a dual prime editing system that further comprises a 3′ PEgRNA, e.g., a 3′ PEgRNA having a spacer sequence and a corresponding PBS as exemplified in Tables 20A-36B, wherein the 3′ PEgRNA comprises an editing template comprising a RTT sequence having a region of complementarity to the 5′ RTT. The 3′ RTT can comprise any of the RTT sequences provided in Table 38, wherein the 3′ RTT sequence has the same RTT Pairing number as that of the 5′ RTT. The editing template of the 5′ PEgRNA and the 3′ PEgRNA can be completely complementary to each other, wherein the 5′ editing template and the 3′ editing template have the same length and perfect complementarity to each other. Alternatively, the 5′ editing template can comprise a region of complementarity to the 3′ editing template, and further comprise a non-complementary region to the 3′ editing template. The 3′ editing template can comprise a region of complementarity to the 5′ editing template, and further comprise a non-complementary region to the 5′ editing template. The non-complementary region can be at the 5′ end or the 3′ end of the editing templates. Contacting the target DMPK gene with the prime editing system can result in deletion of the sequence between the 5′ PEgRNA nick and the 3′ PEgRNA nick (the IND) and insertion of the region of complementarity between the 5′ editing template and the 3′ editing template (the OD), or insertion of the region of complementarity between the 5′ editing template and the 3′ editing template as well as the non-complementarity regions (the RD), and hence replace the CTG expansion with the sequence of the OD or the RD. Each of the 5′ PEgRNA is assigned a RTT pairing number, and can be used in a dual prime editing composition with a 3′ PEgRNA comprising an RTT having the same RTT pairing number.

[0629] In some embodiments, a prime editing composition comprises a 5′ PEgRNA or component thereof exemplified in Tables 2A and 2B and a 3′ PEgRNA, wherein the editing template of the 5′ PEgRNA comprises a region of identity to the spacer of the 3′ PEgRNA. In some embodiments, the editing template of the 3′ PEgRNA comprises a region of identity to the spacer of the 5′ PEgRNA. In some embodiments, the 5′ editing template comprises a region of complementarity to a region on the second strand of the DMPK gene that is directly 3′ to nucleotide 3 of the search target sequence of the 3′ PEgRNA. In some embodiments, the 3′ editing template comprises a region of complementarity to a region on the first strand of the DMPK gene that is directly 3′ to nucleotide 3 of the search target sequence of the 5′ PEgRNA. For example, the extension arm of the 5′ PEgRNA can comprise an editing template comprising the sequence of any of the RTT sequences provided in Table 39. Each of the RTT sequences in Table 39 is assigned a pairing 3′ spacer number. The 5′ PEgRNA can be used in a dual prime editing system with a 3′ PEgRNA, wherein the 3′ PEgRNA comprises a spacer that has the Pairing 3′ spacer number assigned to the 5′ RTT in Table 39. Contacting the target DMPK gene with the prime editing system can result in deletion of the sequence between the 5′ PEgRNA nick and the 3′ PEgRNA nick (the IND) without insertion of any exogenous sequence (a “clean deletion”). Alternatively, the 5′ editing template and the 3′ editing template can further comprise a region of complementarity to each other, and the region of complementarity can replace the IND in the DMPK gene. For example, in some embodiments, the 5′ PEgRNA is part of a dual prime editing composition that further comprises a 3′ PEgRNA, wherein the 5′ PEgRNA comprises a RTT comprising a sequence selected from sequence numbers 3459-3461 and 3467-3471, and the 3′ PEgRNA comprises a spacer comprising nucleotides 5-20 of sequence number 1525. In some embodiments, the 5′ PEgRNA is part of a dual prime editing composition that further comprises a 3′ PEgRNA, wherein the 5′ PEgRNA comprises a RTT comprising a sequence selected from sequence numbers 3462-3466, and the 3′ PEgRNA comprises a spacer comprising nucleotides 5-20 of sequence number 2353. In some embodiments, the 5′ PEgRNA is part of a dual prime editing composition that further comprises a 3′ PEgRNA, wherein the 5′ PEgRNA comprises a RTT comprising a sequence selected from sequence numbers 3472-3476, and the 3′ PEgRNA comprises a spacer comprising nucleotides 5-20 of sequence number 1936. In some embodiments, the 5′ PEgRNA is part of a dual prime editing composition that further comprises a 3′ PEgRNA, wherein the 5′ PEgRNA comprises a RTT comprising nucleotides x-40 of sequence number 3647, 3648, 3649, 3650, 3651, 3652, 3653, 3654, 3655, 3656, 3657, 3658, 3659, 3660, 3661, 3662, or 3663, wherein the 3′ PEgRNA comprises a spacer comprising nucleotides 5-20 of sequence number 1900, 1918, 1403, 1936, 2263, 2353, 1503, 2281, 2673, 1525, 2299, 2317, 1864, 1359, 2335, 1882, or 1381 respectively in the same order, and wherein x is any integer from 1 to 31. Preferably, the 3′ PEgRNA comprises a “clean deletion” RTT, for example, an RTT selected from Table 40 that has a Pairing 5′ spacer number that is 2. Each 5′ PEgRNA is assigned a RTT pairing number, which corresponds to a pairing 3′ spacer number in Table 39. The 5′ PEgRNA can be used in a dual prime editing system or composition with a 3′ PEgRNA comprising a spacer of the same pairing 3′ spacer number.

### Tables 3A and 3B

[0630] Tables 3A and 3B provide exemplary 5′ PEgRNAs and components that can be used with any prime editor containing a Cas9 protein capable of recognizing a NGG PAM sequence, wherein N is A, G, C, or T. The PEgRNAs exemplified in Tables 3A and 3B comprise: (a) a spacer comprising at its 3′ end a sequence corresponding to nucleotides 5-20 of sequence number 39, (b) a gRNA core capable of binding to a Cas9 protein, and (c) an extension arm comprising (i) an editing template and (ii) a primer binding site (PBS) comprising at its 5′ end the sequence corresponding to sequence number 54.

[0631] The PEgRNA spacer can be, for example, 16-22 nucleotides in length. In some embodiments, the PEgNA spacer is 16-20 nucleotides in length. In some embodiments, the PEgRNA spacer comprises nucleotides 5-20, 4-20, 3-20, 2-20, or 1-20 of sequence number 39. In some embodiments, the PEgRNA spacer comprises the sequence of sequence number 39. In some embodiments, the PEgRNA spacer is 20 nucleotides in length. Any of these spacers exemplified can be referred to as 5′ spacer No. 3.

[0632] The PBS can be, for example, 3 to 19 nucleotides in length. In some embodiments, the PBS is 3 to 17 nucleotides in length and corresponds to a PBS sequence in Table 3A. In some cases, a PBS length of no more than 3 nucleotides less than the PEgRNA spacer length is chosen.

[0633] The 5′ PEgRNAs of Tables 3A and 3B can be used in a dual prime editing system or composition further comprising any suitable 3′ PEgRNA. The prime editing system can be used, e.g., for editing a DMPK gene harboring 50 or more CTG repeats in the DMPK gene.

[0634] In some embodiments, a prime editing composition comprises a 5′ PEgRNA or component thereof exemplified in Tables 3A and 3B and a 3′ PEgRNA, wherein the editing template of the 5′ PEgRNA and the 3′ PEgRNA each comprises a region of complementarity to each other. For example, the editing template of the 5′ PEgRNA can comprise any of the RTT sequences provided in Table 37. The terms editing template and RTT may be used interchangeably. Each of the RTT sequences in Table 37 is assigned a RTT pairing number that reflects the complementarity relationship between a 5′ RTT and a 3′ RTT. The 5′ PEgRNA can be used in a dual prime editing system that further comprises a 3′ PEgRNA, e.g., a 3′ PEgRNA having a spacer sequence and a corresponding PBS as exemplified in Tables 20A-36B, wherein the 3′ PEgRNA comprises an editing template comprising a RTT sequence having a region of complementarity to the 5′ RTT. The 3′ RTT can comprise any of the RTT sequences provided in Table 38, wherein the 3′ RTT sequence has the same RTT Pairing number as that of the 5′ RTT. The editing template of the 5′ PEgRNA and the 3′ PEgRNA can be completely complementary to each other, wherein the 5′ editing template and the 3′ editing template have the same length and perfect complementarity to each other. Alternatively, the 5′ editing template can comprise a region of complementarity to the 3′ editing template, and further comprise a non-complementary region to the 3′ editing template. The 3′ editing template can comprise a region of complementarity to the 5′ editing template, and further comprise a non-complementary region to the 5′ editing template. The non-complementary region can be at the PEgRNA nick (the IND) and insertion of the region of complementarity between the 5′ editing template and the 3′ editing template (the OD), or insertion of the region of complementarity between the 5′ editing template and the 3′ editing template as well as the non-complementarity regions (the RD), and hence replace the CTG expansion with the sequence of the OD or the RD. Each of the 5′ PEgRNA is assigned a RTT pairing number, and can be used in a dual prime editing composition with a 3′ PEgRNA comprising an RTT having the same RTT pairing number.

[0635] In some embodiments, a prime editing composition comprises a 5′ PEgRNA or component thereof exemplified in Tables 3A and 3B and a 3′ PEgRNA, wherein the editing template of the 5′ PEgRNA comprises a region of identity to the spacer of the 3′ PEgRNA. In some embodiments, the editing template of the 3′ PEgRNA comprises a region of identity to the spacer of the 5′ PEgRNA. In some embodiments, the 5′ editing template comprises a region of complementarity to a region on the second strand of the DMPK gene that is directly 3′ to nucleotide 3 of the search target sequence of the 3′ PEgRNA. In some embodiments, the 3′ editing template comprises a region of complementarity to a region on the first strand of the DMPK gene that is directly 3′ to nucleotide 3 of the search target sequence of the 5′ PEgRNA. For example, the extension arm of the 5′ PEgRNA can comprise an editing template comprising the sequence of any of the RTT sequences provided in Table 39. Each of the RTT sequences in Table 39 is assigned a pairing 3′ spacer number. The 5′ PEgRNA can be used in a dual prime editing system with a 3′ PEgRNA, wherein the 3′ PEgRNA comprises a spacer that has the Pairing 3′ spacer number assigned to the 5′ RTT in Table 39. Contacting the target DMPK gene with the prime editing system can result in deletion of the sequence between the 5′ PEgRNA nick and the 3′ PEgRNA nick (the IND) without insertion of any exogenous sequence (a “clean deletion”). Alternatively, the 5′ editing template and the 3′ editing template can further comprise a region of complementarity to each other, and the region of complementarity can replace the IND in the DMPK gene. For example, in some embodiments, the 5′ PEgRNA is part of a dual prime editing composition that further comprises a 3′ PEgRNA, wherein the 5′ PEgRNA comprises a RTT comprising a sequence selected from sequence numbers 3459-3461 and 3467-3471, and the 3′ PEgRNA comprises a spacer comprising nucleotides 5-20 of sequence number 1525. In some embodiments, the 5′ PEgRNA is part of a dual prime editing composition that further comprises a 3′ PEgRNA, wherein the 5′ PEgRNA comprises a RTT comprising a sequence selected from sequence numbers 3462-3466, and the 3′ PEgRNA comprises a spacer comprising nucleotides 5-20 of sequence number 2353. In some embodiments, the 5′ PEgRNA is part of a dual prime editing composition that further comprises a 3′ PEgRNA, wherein the 5′ PEgRNA comprises a RTT comprising a sequence selected from sequence numbers 3472-3476, and the 3′ PEgRNA comprises a spacer comprising nucleotides 5-20 of sequence number 1936. In some embodiments, the 5′ PEgRNA is part of a dual prime editing composition that further comprises a 3′ PEgRNA, wherein the 5′ PEgRNA comprises a RTT comprising nucleotides x-40 of sequence number 3647, 3648, 3649, 3650, 3651, 3652, 3653, 3654, 3655, 3656, 3657, 3658, 3659, 3660, 3661, 3662, or 3663, wherein the 3′ PEgRNA comprises a spacer comprising nucleotides 5-20 of sequence number 1900, 1918, 1403, 1936, 2263, 2353, 1503, 2281, 2673, 1525, 2299, 2317, 1864, 1359, 2335, 1882, or 1381 respectively in the same order, and wherein x is any integer from 1 to 31. Preferably, the 3′ PEgRNA comprises a “clean deletion” RTT, for example, an RTT selected from Table 40 that has a Pairing 5′ spacer number that is 3. Each 5′ PEgRNA is assigned a RTT pairing number, which corresponds to a pairing 3′ spacer number in Table 39. The 5′ PEgRNA can be used in a dual prime editing system or composition with a 3′ PEgRNA comprising a spacer of the same pairing 3′ spacer number.

### Tables 4A and 4B

[0636] Tables 4A and 4B provide exemplary 5′ PEgRNAs and components that can be used with any prime editor containing a Cas9 protein capable of recognizing a NGG PAM sequence, wherein N is A, G, C, or T. The PEgRNAs exemplified in Tables 4A and 4B comprise: (a) a spacer comprising at its 3′ end a sequence corresponding to nucleotides 5-20 of sequence number 58, (b) a gRNA core capable of binding to a Cas9 protein, and (c) an extension arm comprising (i) an editing template and (ii) a primer binding site (PBS) comprising at its 5′ end the sequence corresponding to sequence number 73.

[0637] The PEgRNA spacer can be, for example, 16-22 nucleotides in length. In some embodiments, the PEgNA spacer is 16-20 nucleotides in length. In some embodiments, the PEgRNA spacer comprises nucleotides 5-20, 4-20, 3-20, 2-20, or 1-20 of sequence number 58. In some embodiments, the PEgRNA spacer comprises the sequence of sequence number 58. In some embodiments, the PEgRNA spacer is 20 nucleotides in length. Any of these spacers exemplified can be referred to as 5′ spacer No. 4.

[0638] The PBS can be, for example, 3 to 19 nucleotides in length. In some embodiments, the PBS is 3 to 17 nucleotides in length and corresponds to a PBS sequence in Table 4A. In some cases, a PBS length of no more than 3 nucleotides less than the PEgRNA spacer length is chosen.

[0639] The 5′ PEgRNAs of Tables 4A and 4B can be used in a dual prime editing system or composition further comprising any suitable 3′ PEgRNA. The prime editing system can be used, e.g., for editing a DMPK gene harboring 50 or more CTG repeats in the DMPK gene.

[0640] In some embodiments, a prime editing composition comprises a 5′ PEgRNA or component thereof exemplified in Tables 4A and 4B and a 3′ PEgRNA, wherein the editing template of the 5′ PEgRNA and the 3′ PEgRNA each comprises a region of complementarity to each other. For example, the editing template of the 5′ PEgRNA can comprise any of the RTT sequences provided in Table 37. The terms editing template and RTT may be used interchangeably. Each of the RTT sequences in Table 37 is assigned a RTT pairing number that reflects the complementarity relationship between a 5′ RTT and a 3′ RTT. The 5′ PEgRNA can be used in a dual prime editing system that further comprises a 3′ PEgRNA, e.g., a 3′ PEgRNA having a spacer sequence and a corresponding PBS as exemplified in Tables 20A-36B, wherein the 3′ PEgRNA comprises an editing template comprising a RTT sequence having a region of complementarity to the 5′ RTT. The 3′ RTT can comprise any of the RTT sequences provided in Table 38, wherein the 3′ RTT sequence has the same RTT Pairing number as that of the 5′ RTT. The editing template of the 5′ PEgRNA and the 3′ PEgRNA can be completely complementary to each other, wherein the 5′ editing template and the 3′ editing template have the same length and perfect complementarity to each other. Alternatively, the 5′ editing template can comprise a region of complementarity to the 3′ editing template, and further comprise a non-complementary region to the 3′ editing template. The 3′ editing template can comprise a region of complementarity to the 5′ editing template, and further comprise a non-complementary region to the 5′ editing template. The non-complementary region can be at the regions (the RD), and hence replace the CTG expansion with the sequence of the OD or the RD. Each of the 5′ PEgRNA is assigned a RTT pairing number, and can be used in a dual prime editing composition with a 3′ PEgRNA comprising an RTT having the same RTT pairing number.

[0641] In some embodiments, a prime editing composition comprises a 5′ PEgRNA or component thereof exemplified in Tables 4A and 4B and a 3′ PEgRNA, wherein the editing template of the 5′ PEgRNA comprises a region of identity to the spacer of the 3′ PEgRNA. In some embodiments, the editing template of the 3′ PEgRNA comprises a region of identity to the spacer of the 5′ PEgRNA. In some embodiments, the 5′ editing template comprises a region of complementarity to a region on the second strand of the DMPK gene that is directly 3′ to nucleotide 3 of the search target sequence of the 3′ PEgRNA. In some embodiments, the 3′ editing template comprises a region of complementarity to a region on the first strand of the DMPK gene that is directly 3′ to nucleotide 3 of the search target sequence of the 5′ PEgRNA. For example, the extension arm of the 5′ PEgRNA can comprise an editing template comprising the sequence of any of the RTT sequences provided in Table 39. Each of the RTT sequences in Table 39 is assigned a pairing 3′ spacer number. The 5′ PEgRNA can be used in a dual prime editing system with a 3′ PEgRNA, wherein the 3′ PEgRNA comprises a spacer that has the Pairing 3′ spacer number assigned to the 5′ RTT in Table 39. Contacting the target DMPK gene with the prime editing system can result in deletion of the sequence between the 5′ PEgRNA nick and the 3′ PEgRNA nick (the IND) without insertion of any exogenous sequence (a “clean deletion”). Alternatively, the 5′ editing template and the 3′ editing template can further comprise a region of complementarity to each other, and the region of complementarity can replace the IND in the DMPK gene. For example, in some embodiments, the 5′ PEgRNA is part of a dual prime editing composition that further comprises a 3′ PEgRNA, wherein the 5′ PEgRNA comprises a RTT comprising a sequence selected from sequence numbers 3459-3461 and 3467-3471, and the 3′ PEgRNA comprises a spacer comprising nucleotides 5-20 of sequence number 1525. In some embodiments, the 5′ PEgRNA is part of a dual prime editing composition that further comprises a 3′ PEgRNA, wherein the 5′ PEgRNA comprises a RTT comprising a sequence selected from sequence numbers 3462-3466, and the 3′ PEgRNA comprises a spacer comprising nucleotides 5-20 of sequence number 2353. In some embodiments, the 5′ PEgRNA is part of a dual prime editing composition that further comprises a 3′ PEgRNA, wherein the 5′ PEgRNA comprises a RTT comprising a sequence selected from sequence numbers 3472-3476, and the 3′ PEgRNA comprises a spacer comprising nucleotides 5-20 of sequence number 1936. In some embodiments, the 5′ PEgRNA is part of a dual prime editing composition that further comprises a 3′ PEgRNA, wherein the 5′ PEgRNA comprises a RTT comprising nucleotides x-40 of sequence number 3647, 3648, 3649, 3650, 3651, 3652, 3653, 3654, 3655, 3656, 3657, 3658, 3659, 3660, 3661, 3662, or 3663, wherein the 3′ PEgRNA comprises a spacer comprising nucleotides 5-20 of sequence number 1900, 1918, 1403, 1936, 2263, 2353, 1503, 2281, 2673, 1525, 2299, 2317, 1864, 1359, 2335, 1882, or 1381 respectively in the same order, and wherein x is any integer from 1 to 31. Preferably, the 3′ PEgRNA comprises a “clean deletion” RTT, for example, an RTT selected from Table 40 that has a Pairing 5′ spacer number that is 4. Each 5′ PEgRNA is assigned a RTT pairing number, which corresponds to a pairing 3′ spacer number in Table 39. The 5′ PEgRNA can be used in a dual prime editing system or composition with a 3′ PEgRNA comprising a spacer of the same pairing 3′ spacer number.

### Tables 6A and 6B

[0642] Tables 6A and 6B provide exemplary 5′ PEgRNAs and components that can be used with any prime editor containing a Cas9 protein capable of recognizing a NGG PAM sequence, wherein N is A, G, C, or T. The PEgRNAs exemplified in Tables 6A and 6B comprise: (a) a spacer comprising at its 3′ end a sequence corresponding to nucleotides 5-20 of sequence number 484, (b) a gRNA core capable of binding to a Cas9 protein, and (c) an extension arm comprising (i) an editing template and (ii) a primer binding site (PBS) comprising at its 5′ end the sequence corresponding to sequence number 499.

[0643] The PEgRNA spacer can be, for example, 16-22 nucleotides in length. In some embodiments, the PEgNA spacer is 16-20 nucleotides in length. In some embodiments, the PEgRNA spacer comprises nucleotides 5-20, 4-20, 3-20, 2-20, or 1-20 of sequence number 484. In some embodiments, the PEgRNA spacer comprises the sequence of sequence number 484. In some embodiments, the PEgRNA spacer is 20 nucleotides in length. Any of these spacers exemplified can be referred to as 5′ spacer No. 6.

[0644] The PBS can be, for example, 3 to 19 nucleotides in length. In some embodiments, the PBS is 3 to 17 nucleotides in length and corresponds to a PBS sequence in Table 6A. In some cases, a PBS length of no more than 3 nucleotides less than the PEgRNA spacer length is chosen.

[0645] The 5′ PEgRNAs of Tables 6A and 6B can be used in a dual prime editing system or composition further comprising any suitable 3′ PEgRNA. The prime editing system can be used, e.g., for editing a DMPK gene harboring 50 or more CTG repeats in the DMPK gene.

[0646] In some embodiments, a prime editing composition comprises a 5′ PEgRNA or component thereof exemplified in Tables 6A and 6B and a 3′ PEgRNA, wherein the editing template of the 5′ PEgRNA and the 3′ PEgRNA each comprises a region of complementarity to each other. For example, the editing template of the 5′ PEgRNA can comprise any of the RTT sequences provided in Table 37. The terms editing template and RTT may be used interchangeably. Each of the RTT sequences in Table 37 is assigned a RTT pairing number that reflects the complementarity relationship between a 5′ RTT and a 3′ RTT. The 5′ PEgRNA can be used in a dual prime editing system that further comprises a 3′ PEgRNA, e.g., a 3′ PEgRNA having a spacer sequence and a corresponding PBS as exemplified in Tables 20A-36B, wherein the 3′ PEgRNA comprises an editing template comprising a RTT sequence having a region of complementarity to the 5′ RTT. The 3′ RTT can comprise any of the RTT sequences provided in Table 38, wherein the 3′ RTT sequence has the same RTT Pairing number as that of the 5′ RTT. The editing template of the 5′ PEgRNA and the 3′ PEgRNA can be completely complementary to each other, wherein the 5′ editing template and the 3′ editing template have the same length and perfect complementarity to each other. Alternatively, the 5′ editing template can comprise a region of complementarity to the 3′ editing template, and further comprise a non-complementary region to the 3′ editing template. The 3′ editing template can comprise a region of complementarity to the 5′ editing template, and further comprise a non-complementary region to the 5′ editing template. The non-complementary region can be at the 5′ end or the 3′ end of the editing templates. Contacting the target DMPK gene with the prime editing system can result in deletion of the sequence between the 5′ PEgRNA nick and the 3′ PEgRNA nick (the IND) and insertion of the region of complementarity between the 5′ editing template and the 3′ editing template (the OD), or insertion of the region of complementarity between the 5′ editing template and the 3′ editing template as well as the non-complementarity regions (the RD), and hence replace the CTG expansion with the sequence of the OD or the RD. Each of the 5′ PEgRNA is assigned a RTT pairing number, and can be used in a dual prime editing composition with a 3′ PEgRNA comprising an RTT having the same RTT pairing number.

[0647] In some embodiments, a prime editing composition comprises a 5′ PEgRNA or component thereof exemplified in Tables 6A and 6B and a 3′ PEgRNA, wherein the editing template of the 5′ PEgRNA comprises a region of identity to the spacer of the 3′ PEgRNA. In some embodiments, the editing template of the 3′ PEgRNA comprises a region of identity to the spacer of the 5′ PEgRNA. In some embodiments, the 5′ editing template comprises a region of complementarity to a region on the second strand of the DMPK gene that is directly 3′ to nucleotide 3 of the search target sequence of the 3′ PEgRNA. In some embodiments, the 3′ editing template comprises a region of complementarity to a region on the first strand of the DMPK gene that is directly 3′ to nucleotide 3 of the search target sequence of the 5′ PEgRNA. For example, the extension arm of the 5′ PEgRNA can comprise an editing template comprising the sequence of any of the RTT sequences provided in Table 39. Each of the RTT sequences in Table 39 is assigned a pairing 3′ spacer number. The 5′ PEgRNA can be used in a dual prime editing system with a 3′ PEgRNA, wherein the 3′ PEgRNA comprises a spacer that has the Pairing 3′ spacer number assigned to the 5′ RTT in Table 39. Contacting the target DMPK gene with the prime editing system can result in deletion of the sequence between the 5′ PEgRNA nick and the 3′ PEgRNA nick (the IND) without insertion of any exogenous sequence (a “clean deletion”). Alternatively, the 5′ editing template and the 3′ editing template can further comprise a region of complementarity to each other, and the region of complementarity can replace the IND in the DMPK gene. For example, in some embodiments, the 5′ PEgRNA is part of a dual prime editing composition that further comprises a 3′ PEgRNA, wherein the 5′ PEgRNA comprises a RTT comprising a sequence selected from sequence numbers 3459-3461 and 3467-3471, and the 3′ PEgRNA comprises a spacer comprising nucleotides 5-20 of sequence number 1525. In some embodiments, the 5′ PEgRNA is part of a dual prime editing composition that further comprises a 3′ PEgRNA, wherein the 5′ PEgRNA comprises a RTT comprising a sequence selected from sequence numbers 3462-3466, and the 3′ PEgRNA comprises a spacer comprising nucleotides 5-20 of sequence number 2353. In some embodiments, the 5′ PEgRNA is part of a dual prime editing composition that further comprises a 3′ PEgRNA, wherein the 5′ PEgRNA comprises a RTT comprising a sequence selected from sequence numbers 3472-3476, and the 3′ PEgRNA comprises a spacer comprising nucleotides 5-20 of sequence number 1936. In some embodiments, the 5′ PEgRNA is part of a dual prime editing composition that further comprises a 3′ PEgRNA, wherein the 5′ PEgRNA comprises a RTT comprising nucleotides x-40 of sequence number 3647, 3648, 3649, 3650, 3651, 3652, 3653, 3654, 3655, 3656, 3657, 3658, 3659, 3660, 3661, 3662, or 3663, wherein the 3′ PEgRNA comprises a spacer comprising nucleotides 5-20 of sequence number 1900, 1918, 1403, 1936, 2263, 2353, 1503, 2281, 2673, 1525, 2299, 2317, 1864, 1359, 2335, 1882, or 1381 respectively in the same order, and wherein x is any integer from 1 to 31. Preferably, the 3′ PEgRNA comprises a “clean deletion” RTT, for example, an RTT selected from Table 40 that has a Pairing 5′ spacer number that is 6. Each 5′ PEgRNA is assigned a RTT pairing number, which corresponds to a pairing 3′ spacer number in Table 39. The 5′ PEgRNA can be used in a dual prime editing system or composition with a 3′ PEgRNA comprising a spacer of the same pairing 3′ spacer number.

### Tables 7A and 7B

[0648] Tables 7A and 7B provide exemplary 5′ PEgRNAs and components that can be used with any prime editor containing a Cas9 protein capable of recognizing a NGG PAM sequence, wherein N is A, G, C, or T. The PEgRNAs exemplified in Tables 7A and 7B comprise: (a) a spacer comprising at its 3′ end a sequence corresponding to nucleotides 5-20 of sequence number 518, (b) a gRNA core capable of binding to a Cas9 protein, and (c) an extension arm comprising (i) an editing template and (ii) a primer binding site (PBS) comprising at its 5′ end the sequence corresponding to sequence number 533.

[0649] The PEgRNA spacer can be, for example, 16-22 nucleotides in length. In some embodiments, the PEgNA spacer is 16-20 nucleotides in length. In some embodiments, the PEgRNA spacer comprises nucleotides 5-20, 4-20, 3-20, 2-20, or 1-20 of sequence number 518. In some embodiments, the PEgRNA spacer comprises the sequence of sequence number 518. In some embodiments, the PEgRNA spacer is 20 nucleotides in length. Any of these spacers exemplified can be referred to as 5′ spacer No. 7.

[0650] The PBS can be, for example, 3 to 19 nucleotides in length. In some embodiments, the PBS is 3 to 17 nucleotides in length and corresponds to a PBS sequence in Table 7A. In some cases, a PBS length of no more than 3 nucleotides less than the PEgRNA spacer length is chosen.

[0651] The 5′ PEgRNAs of Tables 7A and 7B can be used in a dual prime editing system or composition further comprising any suitable 3′ PEgRNA. The prime editing system can be used, e.g., for editing a DMPK gene harboring 50 or more CTG repeats in the DMPK gene.

[0652] In some embodiments, a prime editing composition comprises a 5′ PEgRNA or component thereof exemplified in Tables 7A and 7B and a 3′ PEgRNA, wherein the editing template of the 5′ PEgRNA and the 3′ PEgRNA each comprises a region of complementarity to each other. For example, the editing template of the 5′ PEgRNA can comprise any of the RTT sequences provided in Table 37. The terms editing template and RTT may be used interchangeably. Each of the RTT sequences in Table 37 is assigned a RTT pairing number that reflects the complementarity relationship between a 5′ RTT and a 3′ RTT. The 5′ PEgRNA can be used in a dual prime editing system that further comprises a 3′ PEgRNA, e.g., a 3′ PEgRNA having a spacer sequence and a corresponding PBS as exemplified in Tables 20A-36B, wherein the 3′ PEgRNA comprises an editing template comprising a RTT sequence having a region of complementarity to the 5′ RTT. The 3′ RTT can comprise any of the RTT sequences provided in Table 38, wherein the 3′ RTT sequence has the same RTT Pairing number as that of the 5′ RTT. The editing template of the 5′ PEgRNA and the 3′ PEgRNA can be completely complementary to each other, wherein the 5′ editing template and the 3′ editing template have the same length and perfect complementarity to each other. Alternatively, the 5′ editing template can comprise a region of complementarity to the 3′ editing template, and further comprise a non-complementary region to the 3′ editing template. The 3′ editing template can comprise a region of complementarity to the 5′ editing template, and further comprise a non-complementary region to the 5′ editing template. The non-complementary region can be at the 5′ end or the 3′ end of the editing templates. Contacting the target DMPK gene with the prime editing system can result in deletion of the sequence between the 5′ PEgRNA nick and the 3′ PEgRNA nick (the IND) and insertion of the region of complementarity between the 5′ editing template and the 3′ editing template (the OD), or insertion of the region of complementarity between the 5′ editing template and the 3′ editing template as well as the non-complementarity regions (the RD), and hence replace the CTG expansion with the sequence of the OD or the RD. Each of the 5′ PEgRNA is assigned a RTT pairing number, and can be used in a dual prime editing composition with a 3′ PEgRNA comprising an RTT having the same RTT pairing number.

[0653] In some embodiments, a prime editing composition comprises a 5′ PEgRNA or component thereof exemplified in Tables 7A and 7B and a 3′ PEgRNA, wherein the editing template of the 5′ PEgRNA comprises a region of identity to the spacer of the 3′ PEgRNA. In some embodiments, the editing template of the 3′ PEgRNA comprises a region of identity to the spacer of the 5′ PEgRNA. In some embodiments, the 5′ editing template comprises a region of complementarity to a region on the second strand of the DMPK gene that is directly 3′ to nucleotide 3 of the search target sequence of the 3′ PEgRNA. In some embodiments, the 3′ editing template comprises a region of complementarity to a region on the first strand of the DMPK gene that is directly 3′ to nucleotide 3 of the search target sequence of the 5′ PEgRNA. For example, the extension arm of the 5′ PEgRNA can comprise an editing template comprising the sequence of any of the RTT sequences provided in Table 39. Each of the RTT sequences in Table 39 is assigned a pairing 3′ spacer number. The 5′ PEgRNA can be used in a dual prime editing system with a 3′ PEgRNA, wherein the 3′ PEgRNA comprises a spacer that has the Pairing 3′ spacer number assigned to the 5′ RTT in Table 39. Contacting the target DMPK gene with the prime editing system can result in deletion of the sequence between the 5′ PEgRNA nick and the 3′ PEgRNA nick (the IND) without insertion of any exogenous sequence (a “clean deletion”). Alternatively, the 5′ editing template and the 3′ editing template can further comprise a region of complementarity to each other, and the region of complementarity can replace the IND in the DMPK gene. For example, in some embodiments, the 5′ PEgRNA is part of a dual prime editing composition that further comprises a 3′ PEgRNA, wherein the 5′ PEgRNA comprises a RTT comprising a sequence selected from sequence numbers 3459-3461 and 3467-3471, and the 3′ PEgRNA comprises a spacer comprising nucleotides 5-20 of sequence number 1525. In some embodiments, the 5′ PEgRNA is part of a dual prime editing composition that further comprises a 3′ PEgRNA, wherein the 5′ PEgRNA comprises a RTT comprising a sequence selected from sequence numbers 3462-3466, and the 3′ PEgRNA comprises a spacer comprising nucleotides 5-20 of sequence number 2353. In some embodiments, the 5′ PEgRNA is part of a dual prime editing composition that further comprises a 3′ PEgRNA, wherein the 5′ PEgRNA comprises a RTT comprising a sequence selected from sequence numbers 3472-3476, and the 3′ PEgRNA comprises a spacer comprising nucleotides 5-20 of sequence number 1936. In some embodiments, the 5′ PEgRNA is part of a dual prime editing composition that further comprises a 3′ PEgRNA, wherein the 5′ PEgRNA comprises a RTT comprising nucleotides x-40 of sequence number 3647, 3648, 3649, 3650, 3651, 3652, 3653, 3654, 3655, 3656, 3657, 3658, 3659, 3660, 3661, 3662, or 3663, wherein the 3′ PEgRNA comprises a spacer comprising nucleotides 5-20 of sequence number 1900, 1918, 1403, 1936, 2263, 2353, 1503, 2281, 2673, 1525, 2299, 2317, 1864, 1359, 2335, 1882, or 1381 respectively in the same order, and wherein x is any integer from 1 to 31. Preferably, the 3′ PEgRNA comprises a “clean deletion” RTT, for example, an RTT selected from Table 40 that has a Pairing 5′ spacer number that is 7. Each 5′ PEgRNA is assigned a RTT pairing number, which corresponds to a pairing 3′ spacer number in Table 39. The 5′ PEgRNA can be used in a dual prime editing system or composition with a 3′ PEgRNA comprising a spacer of the same pairing 3′ spacer number.

### Tables 9A and 9B

[0654] Tables 9A and 9B provide exemplary 5′ PEgRNAs and components that can be used with any prime editor containing a Cas9 protein capable of recognizing a NGG PAM sequence, wherein N is A, G, C, or T. The PEgRNAs exemplified in Tables 9A and 9B comprise: (a) a spacer comprising at its 3′ end a sequence corresponding to nucleotides 5-20 of sequence number 554, (b) a gRNA core capable of binding to a Cas9 protein, and (c) an extension arm comprising (i) an editing template and (ii) a primer binding site (PBS) comprising at its 5′ end the sequence corresponding to sequence number 569.

[0655] The PEgRNA spacer can be, for example, 16-22 nucleotides in length. In some embodiments, the PEgNA spacer is 16-20 nucleotides in length. In some embodiments, the PEgRNA spacer comprises nucleotides 5-20, 4-20, 3-20, 2-20, or 1-20 of sequence number 554. In some embodiments, the PEgRNA spacer comprises the sequence of sequence number 554. In some embodiments, the PEgRNA spacer is 20 nucleotides in length. Any of these spacers exemplified can be referred to as 5′ spacer No. 9.

[0656] The PBS can be, for example, 3 to 19 nucleotides in length. In some embodiments, the PBS is 3 to 17 nucleotides in length and corresponds to a PBS sequence in Table 9A. In some cases, a PBS length of no more than 3 nucleotides less than the PEgRNA spacer length is chosen.

[0657] The 5′ PEgRNAs of Tables 9A and 9B can be used in a dual prime editing system or composition further comprising any suitable 3′ PEgRNA. The prime editing system can be used, e.g., for editing a DMPK gene harboring 50 or more CTG repeats in the DMPK gene.

[0658] In some embodiments, a prime editing composition comprises a 5′ PEgRNA or component thereof exemplified in Tables 9A and 9B and a 3′ PEgRNA, wherein the editing template of the 5′ PEgRNA and the 3′ PEgRNA each comprises a region of complementarity to each other. For example, the editing template of the 5′ PEgRNA can comprise any of the RTT sequences provided in Table 37. The terms editing template and RTT may be used interchangeably. Each of the RTT sequences in Table 37 is assigned a RTT pairing number that reflects the complementarity relationship between a 5′ RTT and a 3′ RTT. The 5′ PEgRNA can be used in a dual prime editing system that further comprises a 3′ PEgRNA, e.g., a 3′ PEgRNA having a spacer sequence and a corresponding PBS as exemplified in Tables 20A-36B, wherein the 3′ PEgRNA comprises an editing template comprising a RTT sequence having a region of complementarity to the 5′ RTT. The 3′ RTT can comprise any of the RTT sequences provided in Table 38, wherein the 3′ RTT sequence has the same RTT Pairing number as that of the 5′ RTT. The editing template of the 5′ PEgRNA and the 3′ PEgRNA can be completely complementary to each other, wherein the 5′ editing template and the 3′ editing template have the same length and perfect complementarity to each other. Alternatively, the 5′ editing template can comprise a region of complementarity to the 3′ editing template, and further comprise a non-complementary region to the 3′ editing template. The 3′ editing template can comprise a region of complementarity to the 5′ editing template, and further comprise a non-complementary region to the 5′ editing template. The non-complementary region can be at the 5′ end or the 3′ end of the editing templates. Contacting the target DMPK gene with the prime editing system can result in deletion of the sequence between the 5′ PEgRNA nick and the 3′ PEgRNA nick (the IND) and insertion of the region of complementarity between the 5′ editing template and the 3′ editing template (the OD), or insertion of the region of complementarity between the 5′ editing template and the 3′ editing template as well as the non-complementarity regions (the RD), and hence replace the CTG expansion with the sequence of the OD or the RD. Each of the 5′ PEgRNA is assigned a RTT pairing number, and can be used in a dual prime editing composition with a 3′ PEgRNA comprising an RTT having the same RTT pairing number.

[0659] In some embodiments, a prime editing composition comprises a 5′ PEgRNA or component thereof exemplified in Tables 9A and 9B and a 3′ PEgRNA, wherein the editing template of the 5′ PEgRNA comprises a region of identity to the spacer of the 3′ PEgRNA. In some embodiments, the editing template of the 3′ PEgRNA comprises a region of identity to the spacer of the 5′ PEgRNA. In some embodiments, the 5′ editing template comprises a region of complementarity to a region on the second strand of the DMPK gene that is directly 3′ to nucleotide 3 of the search target sequence of the 3′ PEgRNA. In some embodiments, the 3′ editing template comprises a region of complementarity to a region on the first strand of the DMPK gene that is directly 3′ to nucleotide 3 of the search target sequence of the 5′ PEgRNA. For example, the extension arm of the 5′ PEgRNA can comprise an editing template comprising the sequence of any of the RTT sequences provided in Table 39. Each of the RTT sequences in Table 39 is assigned a pairing 3′ spacer number. The 5′ PEgRNA can be used in a dual prime editing system with a 3′ PEgRNA, wherein the 3′ PEgRNA comprises a spacer that has the Pairing 3′ spacer number assigned to the 5′ RTT in Table 39. Contacting the target DMPK gene with the prime editing system can result in deletion of the sequence between the 5′ PEgRNA nick and the 3′ PEgRNA nick (the IND) without insertion of any exogenous sequence (a “clean deletion”). Alternatively, the 5′ editing template and the 3′ editing template can further comprise a region of complementarity to each other, and the region of complementarity can replace the IND in the DMPK gene. For example, in some embodiments, the 5′ PEgRNA is part of a dual prime editing composition that further comprises a 3′ PEgRNA, wherein the 5′ PEgRNA comprises a RTT comprising a sequence selected from sequence numbers 3459-3461 and 3467-3471, and the 3′ PEgRNA comprises a spacer comprising nucleotides 5-20 of sequence number 1525. In some embodiments, the 5′ PEgRNA is part of a dual prime editing composition that further comprises a 3′ PEgRNA, wherein the 5′ PEgRNA comprises a RTT comprising a sequence selected from sequence numbers 3462-3466, and the 3′ PEgRNA comprises a spacer comprising nucleotides 5-20 of sequence number 2353. In some embodiments, the 5′ PEgRNA is part of a dual prime editing composition that further comprises a 3′ PEgRNA, wherein the 5′ PEgRNA comprises a RTT comprising a sequence selected from sequence numbers 3472-3476, and the 3′ PEgRNA comprises a spacer comprising nucleotides 5-20 of sequence number 1936. In some embodiments, the 5′ PEgRNA is part of a dual prime editing composition that further comprises a 3′ PEgRNA, wherein the 5′ PEgRNA comprises a RTT comprising nucleotides x-40 of sequence number 3647, 3648, 3649, 3650, 3651, 3652, 3653, 3654, 3655, 3656, 3657, 3658, 3659, 3660, 3661, 3662, or 3663, wherein the 3′ PEgRNA comprises a spacer comprising nucleotides 5-20 of sequence number 1900, 1918, 1403, 1936, 2263, 2353, 1503, 2281, 2673, 1525, 2299, 2317, 1864, 1359, 2335, 1882, or 1381 respectively in the same order, and wherein x is any integer from 1 to 31. Preferably, the 3′ PEgRNA comprises a “clean deletion” RTT, for example, an RTT selected from Table 40 that has a Pairing 5′ spacer number that is 9. Each 5′ PEgRNA is assigned a RTT pairing number, which corresponds to a pairing 3′ spacer number in Table 39. The 5′ PEgRNA can be used in a dual prime editing system or composition with a 3′ PEgRNA comprising a spacer of the same pairing 3′ spacer number.

### Tables 10A and 10B

[0660] Tables 10A and 10B provide exemplary 5′ PEgRNAs and components that can be used with any prime editor containing a Cas9 protein capable of recognizing a NGG PAM sequence, wherein N is A, G, C, or T. The PEgRNAs exemplified in Tables 10A and 10B comprise: (a) a spacer comprising at its 3′ end a sequence corresponding to nucleotides 5-20 of sequence number 572, (b) a gRNA core capable of binding to a Cas9 protein, and (c) an extension arm comprising (i) an editing template and (ii) a primer binding site (PBS) comprising at its 5′ end the sequence corresponding to sequence number 587.

[0661] The PEgRNA spacer can be, for example, 16-22 nucleotides in length. In some embodiments, the PEgNA spacer is 16-20 nucleotides in length. In some embodiments, the PEgRNA spacer comprises nucleotides 5-20, 4-20, 3-20, 2-20, or 1-20 of sequence number 572. In some embodiments, the PEgRNA spacer comprises the sequence of sequence number 572. In some embodiments, the PEgRNA spacer is 20 nucleotides in length. Any of these spacers exemplified can be referred to as 5′ spacer No. 10.

[0662] The PBS can be, for example, 3 to 19 nucleotides in length. In some embodiments, the PBS is 3 to 17 nucleotides in length and corresponds to a PBS sequence in Table 10A. In some cases, a PBS length of no more than 3 nucleotides less than the PEgRNA spacer length is chosen.

[0663] The 5′ PEgRNAs of Tables 10A and 10B can be used in a dual prime editing system or composition further comprising any suitable 3′ PEgRNA. The prime editing system can be used, e.g., for editing a DMPK gene harboring 50 or more CTG repeats in the DMPK gene.

[0664] In some embodiments, a prime editing composition comprises a 5′ PEgRNA or component thereof exemplified in Tables 10A and 10B and a 3′ PEgRNA, wherein the editing template of the 5′ PEgRNA and the 3′ PEgRNA each comprises a region of complementarity to each other. For example, the editing template of the 5′ PEgRNA can comprise any of the RTT sequences provided in Table 37. The terms editing template and RTT may be used interchangeably. Each of the RTT sequences in Table 37 is assigned a RTT pairing number that reflects the complementarity relationship between a 5′ RTT and a 3′ RTT. The 5′ PEgRNA can be used in a dual prime editing system that further comprises a 3′ PEgRNA, e.g., a 3′ PEgRNA having a spacer sequence and a corresponding PBS as exemplified in Tables 20A-36B, wherein the 3′ PEgRNA comprises an editing template comprising a RTT sequence having a region of complementarity to the 5′ RTT. The 3′ RTT can comprise any of the RTT sequences provided in Table 38, wherein the 3′ RTT sequence has the same RTT Pairing number as that of the 5′ RTT. The editing template of the 5′ PEgRNA and the 3′ PEgRNA can be completely complementary to each other, wherein the 5′ editing template and the 3′ editing template have the same length and perfect complementarity to each other. Alternatively, the 5′ editing template can comprise a region of complementarity to the 3′ editing template, and further comprise a non-complementary region to the 3′ editing template. The 3′ editing template can comprise a region of complementarity to the 5′ editing template, and further comprise a non-complementary region to the 5′ editing template. The non-complementary region can be at the 5′ end or the 3′ end of the editing templates. Contacting the target DMPK gene with the prime editing system can result in deletion of the sequence between the 5′ PEgRNA nick and the 3′ PEgRNA nick (the IND) and insertion of the region of complementarity between the 5′ editing template and the 3′ editing template (the OD), or insertion of the region of complementarity between the 5′ editing template and the 3′ editing template as well as the non-complementarity regions (the RD), and hence replace the CTG expansion with the sequence of the OD or the RD. Each of the 5′ PEgRNA is assigned a RTT pairing number, and can be used in a dual prime editing composition with a 3′ PEgRNA comprising an RTT having the same RTT pairing number.

[0665] In some embodiments, a prime editing composition comprises a 5′ PEgRNA or component thereof exemplified in Tables 10A and 10B and a 3′ PEgRNA, wherein the editing template of the 5′ PEgRNA comprises a region of identity to the spacer of the 3′ PEgRNA. In some embodiments, the editing template of the 3′ PEgRNA comprises a region of identity to the spacer of the 5′ PEgRNA. In some embodiments, the 5′ editing template comprises a region of complementarity to a region on the second strand of the DMPK gene that is directly 3′ to nucleotide 3 of the search target sequence of the 3′ PEgRNA. In some embodiments, the 3′ editing template comprises a region of complementarity to a region on the first strand of the DMPK gene that is directly 3′ to nucleotide 3 of the search target sequence of the 5′ PEgRNA. For example, the extension arm of the 5′ PEgRNA can comprise an editing template comprising the sequence of any of the RTT sequences provided in Table 39. Each of the RTT sequences in Table 39 is assigned a pairing 3′ spacer number. The 5′ PEgRNA can be used in a dual prime editing system with a 3′ PEgRNA, wherein the 3′ PEgRNA comprises a spacer that has the Pairing 3′ spacer number assigned to the 5′ RTT in Table 39. Contacting the target DMPK gene with the prime editing system can result in deletion of the sequence between the 5′ PEgRNA nick and the 3′ PEgRNA nick (the IND) without insertion of any exogenous sequence (a “clean deletion”). Alternatively, the 5′ editing template and the 3′ editing template can further comprise a region of complementarity to each other, and the region of complementarity can replace the IND in the DMPK gene. For example, in some embodiments, the 5′ PEgRNA is part of a dual prime editing composition that further comprises a 3′ PEgRNA, wherein the 5′ PEgRNA comprises a RTT comprising a sequence selected from sequence numbers 3459-3461 and 3467-3471, and the 3′ PEgRNA comprises a spacer comprising nucleotides 5-20 of sequence number 1525. In some embodiments, the 5′ PEgRNA is part of a dual prime editing composition that further comprises a 3′ PEgRNA, wherein the 5′ PEgRNA comprises a RTT comprising a sequence selected from sequence numbers 3462-3466, and the 3′ PEgRNA comprises a spacer comprising nucleotides 5-20 of sequence number 2353. In some embodiments, the 5′ PEgRNA is part of a dual prime editing composition that further comprises a 3′ PEgRNA, wherein the 5′ PEgRNA comprises a RTT comprising a sequence selected from sequence numbers 3472-3476, and the 3′ PEgRNA comprises a spacer comprising nucleotides 5-20 of sequence number 1936. In some embodiments, the 5′ PEgRNA is part of a dual prime editing composition that further comprises a 3′ PEgRNA, wherein the 5′ PEgRNA comprises a RTT comprising nucleotides x-40 of sequence number 3647, 3648, 3649, 3650, 3651, 3652, 3653, 3654, 3655, 3656, 3657, 3658, 3659, 3660, 3661, 3662, or 3663, wherein the 3′ PEgRNA comprises a spacer comprising nucleotides 5-20 of sequence number 1900, 1918, 1403, 1936, 2263, 2353, 1503, 2281, 2673, 1525, 2299, 2317, 1864, 1359, 2335, 1882, or 1381 respectively in the same order, and wherein x is any integer from 1 to 31. Preferably, the 3′ PEgRNA comprises a “clean deletion” RTT, for example, an RTT selected from Table 40 that has a Pairing 5′ spacer number that is 10. Each 5′ PEgRNA is assigned a RTT pairing number, which corresponds to a pairing 3′ spacer number in Table 39. The 5′ PEgRNA can be used in a dual prime editing system or composition with a 3′ PEgRNA comprising a spacer of the same pairing 3′ spacer number.

### Tables 11A and 11B

[0666] Tables 11A and 11B provide exemplary 5′ PEgRNAs and components that can be used with any prime editor containing a Cas9 protein capable of recognizing a NGG PAM sequence, wherein N is A, G, C, or T. The PEgRNAs exemplified in Tables 11A and 11B comprise: (a) a spacer comprising at its 3′ end a sequence corresponding to nucleotides 5-20 of sequence number 590, (b) a gRNA core capable of binding to a Cas9 protein, and (c) an extension arm comprising (i) an editing template and (ii) a primer binding site (PBS) comprising at its 5′ end the sequence corresponding to sequence number 605.

[0667] The PEgRNA spacer can be, for example, 16-22 nucleotides in length. In some embodiments, the PEgNA spacer is 16-20 nucleotides in length. In some embodiments, the PEgRNA spacer comprises nucleotides 5-20, 4-20, 3-20, 2-20, or 1-20 of sequence number 590. In some embodiments, the PEgRNA spacer comprises the sequence of sequence number 590. In some embodiments, the PEgRNA spacer is 20 nucleotides in length. Any of these spacers exemplified can be referred to as 5′ spacer No. 11.

[0668] The PBS can be, for example, 3 to 19 nucleotides in length. In some embodiments, the PBS is 3 to 17 nucleotides in length and corresponds to a PBS sequence in Table 11A. In some cases, a PBS length of no more than 3 nucleotides less than the PEgRNA spacer length is chosen.

[0669] The 5′ PEgRNAs of Tables 11A and 11B can be used in a dual prime editing system or composition further comprising any suitable 3′ PEgRNA. The prime editing system can be used, e.g., for editing a DMPK gene harboring 50 or more CTG repeats in the DMPK gene.

[0670] In some embodiments, a prime editing composition comprises a 5′ PEgRNA or component thereof exemplified in Tables 11A and 11B and a 3′ PEgRNA, wherein the editing template of the 5′ PEgRNA and the 3′ PEgRNA each comprises a region of complementarity to each other. For example, the editing template of the 5′ PEgRNA can comprise any of the RTT sequences provided in Table 37. The terms editing template and RTT may be used interchangeably. Each of the RTT sequences in Table 37 is assigned a RTT pairing number that reflects the complementarity relationship between a 5′ RTT and a 3′ RTT. The 5′ PEgRNA can be used in a dual prime editing system that further comprises a 3′ PEgRNA, e.g., a 3′ PEgRNA having a spacer sequence and a corresponding PBS as exemplified in Tables 20A-36B, wherein the 3′ PEgRNA comprises an editing template comprising a RTT sequence having a region of complementarity to the 5′ RTT. The 3′ RTT can comprise any of the RTT sequences provided in Table 38, wherein the 3′ RTT sequence has the same RTT Pairing number as that of the 5′ RTT. The editing template of the 5′ PEgRNA and the 3′ PEgRNA can be completely complementary to each other, wherein the 5′ editing template and the 3′ editing template have the same length and perfect complementarity to each other. Alternatively, the 5′ editing template can comprise a region of complementarity to the 3′ editing template, and further comprise a non-complementary region to the 3′ editing template. The 3′ editing template can comprise a region of complementarity to the 5′ editing template, and further comprise a non-complementary region to the 5′ editing template. The non-complementary region can be at the 5′ end or the 3′ end of the editing templates. Contacting the target DMPK gene with the prime editing system can result in deletion of the sequence between the 5′ PEgRNA nick and the 3′ PEgRNA nick (the IND) and insertion of the region of complementarity between the 5′ editing template and the 3′ editing template (the OD), or insertion of the region of complementarity between the 5′ editing template and the 3′ editing template as well as the non-complementarity regions (the RD), and hence replace the CTG expansion with the sequence of the OD or the RD. Each of the 5′ PEgRNA is assigned a RTT pairing number, and can be used in a dual prime editing composition with a 3′ PEgRNA comprising an RTT having the same RTT pairing number.

[0671] In some embodiments, a prime editing composition comprises a 5′ PEgRNA or component thereof exemplified in Tables 11A and 11B and a 3′ PEgRNA, wherein the editing template of the 5′ PEgRNA comprises a region of identity to the spacer of the 3′ PEgRNA. In some embodiments, the editing template of the 3′ PEgRNA comprises a region of identity to the spacer of the 5′ PEgRNA. In some embodiments, the 5′ editing template comprises a region of complementarity to a region on the second strand of the DMPK gene that is directly 3′ to nucleotide 3 of the search target sequence of the 3′ PEgRNA. In some embodiments, the 3′ editing template comprises a region of complementarity to a region on the first strand of the DMPK gene that is directly 3′ to nucleotide 3 of the search target sequence of the 5′ PEgRNA. For example, the extension arm of the 5′ PEgRNA can comprise an editing template comprising the sequence of any of the RTT sequences provided in Table 39. Each of the RTT sequences in Table 39 is assigned a pairing 3′ spacer number. The 5′ PEgRNA can be used in a dual prime editing system with a 3′ PEgRNA, wherein the 3′ PEgRNA comprises a spacer that has the Pairing 3′ spacer number assigned to the 5′ RTT in Table 39. Contacting the target DMPK gene with the prime editing system can result in deletion of the sequence between the 5′ PEgRNA nick and the 3′ PEgRNA nick (the IND) without insertion of any exogenous sequence (a “clean deletion”). Alternatively, the 5′ editing template and the 3′ editing template can further comprise a region of complementarity to each other, and the region of complementarity can replace the IND in the DMPK gene. For example, in some embodiments, the 5′ PEgRNA is part of a dual prime editing composition that further comprises a 3′ PEgRNA, wherein the 5′ PEgRNA comprises a RTT comprising a sequence selected from sequence numbers 3459-3461 and 3467-3471, and the 3′ PEgRNA comprises a spacer comprising nucleotides 5-20 of sequence number 1525. In some embodiments, the 5′ PEgRNA is part of a dual prime editing composition that further comprises a 3′ PEgRNA, wherein the 5′ PEgRNA comprises a RTT comprising a sequence selected from sequence numbers 3462-3466, and the 3′ PEgRNA comprises a spacer comprising nucleotides 5-20 of sequence number 2353. In some embodiments, the 5′ PEgRNA is part of a dual prime editing composition that further comprises a 3′ PEgRNA, wherein the 5′ PEgRNA comprises a RTT comprising a sequence selected from sequence numbers 3472-3476, and the 3′ PEgRNA comprises a spacer comprising nucleotides 5-20 of sequence number 1936. In some embodiments, the 5′ PEgRNA is part of a dual prime editing composition that further comprises a 3′ PEgRNA, wherein the 5′ PEgRNA comprises a RTT comprising nucleotides x-40 of sequence number 3647, 3648, 3649, 3650, 3651, 3652, 3653, 3654, 3655, 3656, 3657, 3658, 3659, 3660, 3661, 3662, or 3663, wherein the 3′ PEgRNA comprises a spacer comprising nucleotides 5-20 of sequence number 1900, 1918, 1403, 1936, 2263, 2353, 1503, 2281, 2673, 1525, 2299, 2317, 1864, 1359, 2335, 1882, or 1381 respectively in the same order, and wherein x is any integer from 1 to 31. Preferably, the 3′ PEgRNA comprises a “clean deletion” RTT, for example, an RTT selected from Table 40 that has a Pairing 5′ spacer number that is 11. Each 5′ PEgRNA is assigned a RTT pairing number, which corresponds to a pairing 3′ spacer number in Table 39. The 5′ PEgRNA can be used in a dual prime editing system or composition with a 3′ PEgRNA comprising a spacer of the same pairing 3′ spacer number.

### Tables 12A and 12B

[0672] Tables 12A and 12B provide exemplary 5′ PEgRNAs and components that can be used with any prime editor containing a Cas9 protein capable of recognizing a NGG PAM sequence, wherein N is A, G, C, or T. The PEgRNAs exemplified in Tables 12A and 12B comprise: (a) a spacer comprising at its 3′ end a sequence corresponding to nucleotides 5-20 of sequence number 912, (b) a gRNA core capable of binding to a Cas9 protein, and (c) an extension arm comprising (i) an editing template and (ii) a primer binding site (PBS) comprising at its 5′ end the sequence corresponding to sequence number 927.

[0673] The PEgRNA spacer can be, for example, 16-22 nucleotides in length. In some embodiments, the PEgNA spacer is 16-20 nucleotides in length. In some embodiments, the PEgRNA spacer comprises nucleotides 5-20, 4-20, 3-20, 2-20, or 1-20 of sequence number 912. In some embodiments, the PEgRNA spacer comprises the sequence of sequence number 912. In some embodiments, the PEgRNA spacer is 20 nucleotides in length. Any of these spacers exemplified can be referred to as 5′ spacer No. 12.

[0674] The PBS can be, for example, 3 to 19 nucleotides in length. In some embodiments, the PBS is 3 to 17 nucleotides in length and corresponds to a PBS sequence in Table 12A. In some cases, a PBS length of no more than 3 nucleotides less than the PEgRNA spacer length is chosen.

[0675] The 5′ PEgRNAs of Tables 12A and 12B can be used in a dual prime editing system or composition further comprising any suitable 3′ PEgRNA. The prime editing system can be used, e.g., for editing a DMPK gene harboring 50 or more CTG repeats in the DMPK gene.

[0676] In some embodiments, a prime editing composition comprises a 5′ PEgRNA or component thereof exemplified in Tables 12A and 12B and a 3′ PEgRNA, wherein the editing template of the 5′ PEgRNA and the 3′ PEgRNA each comprises a region of complementarity to each other. For example, the editing template of the 5′ PEgRNA can comprise any of the RTT sequences provided in Table 37. The terms editing template and RTT may be used interchangeably. Each of the RTT sequences in Table 37 is assigned a RTT pairing number that reflects the complementarity relationship between a 5′ RTT and a 3′ RTT. The 5′ PEgRNA can be used in a dual prime editing system that further comprises a 3′ PEgRNA, e.g., a 3′ PEgRNA having a spacer sequence and a corresponding PBS as exemplified in Tables 20A-36B, wherein the 3′ PEgRNA comprises an editing template comprising a RTT sequence having a region of complementarity to the 5′ RTT. The 3′ RTT can comprise any of the RTT sequences provided in Table 38, wherein the 3′ RTT sequence has the same RTT Pairing number as that of the 5′ RTT. The editing template of the 5′ PEgRNA and the 3′ PEgRNA can be completely complementary to each other, wherein the 5′ editing template and the 3′ editing template have the same length and perfect complementarity to each other. Alternatively, the 5′ editing template can comprise a region of complementarity to the 3′ editing template, and further comprise a non-complementary region to the 3′ editing template. The 3′ editing template can comprise a region of complementarity to the 5′ editing template, and further comprise a non-complementary region to the 5′ editing template. The non-complementary region can be at the 5′ end or the 3′ end of the editing templates. Contacting the target DMPK gene with the prime editing system can result in deletion of the sequence between the 5′ PEgRNA nick and the 3′ PEgRNA nick (the IND) and insertion of the region of complementarity between the 5′ editing template and the 3′ editing template (the OD), or insertion of the region of complementarity between the 5′ editing template and the 3′ editing template as well as the non-complementarity regions (the RD), and hence replace the CTG expansion with the sequence of the OD or the RD. Each of the 5′ PEgRNA is assigned a RTT pairing number, and can be used in a dual prime editing composition with a 3′ PEgRNA comprising an RTT having the same RTT pairing number.

[0677] In some embodiments, a prime editing composition comprises a 5′ PEgRNA or component thereof exemplified in Tables 12A and 12B and a 3′ PEgRNA, wherein the editing template of the 5′ PEgRNA comprises a region of identity to the spacer of the 3′ PEgRNA. In some embodiments, the editing template of the 3′ PEgRNA comprises a region of identity to the spacer of the 5′ PEgRNA. In some embodiments, the 5′ editing template comprises a region of complementarity to a region on the second strand of the DMPK gene that is directly 3′ to nucleotide 3 of the search target sequence of the 3′ PEgRNA. In some embodiments, the 3′ editing template comprises a region of complementarity to a region on the first strand of the DMPK gene that is directly 3′ to nucleotide 3 of the search target sequence of the 5′ PEgRNA. For example, the extension arm of the 5′ PEgRNA can comprise an editing template comprising the sequence of any of the RTT sequences provided in Table 39. Each of the RTT sequences in Table 39 is assigned a pairing 3′ spacer number. The 5′ PEgRNA can be used in a dual prime editing system with a 3′ PEgRNA, wherein the 3′ PEgRNA comprises a spacer that has the Pairing 3′ spacer number assigned to the 5′ RTT in Table 39. Contacting the target DMPK gene with the prime editing system can result in deletion of the sequence between the 5′ PEgRNA nick and the 3′ PEgRNA nick (the IND) without insertion of any exogenous sequence (a “clean deletion”). Alternatively, the 5′ editing template and the 3′ editing template can further comprise a region of complementarity to each other, and the region of complementarity can replace the IND in the DMPK gene. For example, in some embodiments, the 5′ PEgRNA is part of a dual prime editing composition that further comprises a 3′ PEgRNA, wherein the 5′ PEgRNA comprises a RTT comprising a sequence selected from sequence numbers 3459-3461 and 3467-3471, and the 3′ PEgRNA comprises a spacer comprising nucleotides 5-20 of sequence number 1525. In some embodiments, the 5′ PEgRNA is part of a dual prime editing composition that further comprises a 3′ PEgRNA, wherein the 5′ PEgRNA comprises a RTT comprising a sequence selected from sequence numbers 3462-3466, and the 3′ PEgRNA comprises a spacer comprising nucleotides 5-20 of sequence number 2353. In some embodiments, the 5′ PEgRNA is part of a dual prime editing composition that further comprises a 3′ PEgRNA, wherein the 5′ PEgRNA comprises a RTT comprising a sequence selected from sequence numbers 3472-3476, and the 3′ PEgRNA comprises a spacer comprising nucleotides 5-20 of sequence number 1936. In some embodiments, the 5′ PEgRNA is part of a dual prime editing composition that further comprises a 3′ PEgRNA, wherein the 5′ PEgRNA comprises a RTT comprising nucleotides x-40 of sequence number 3647, 3648, 3649, 3650, 3651, 3652, 3653, 3654, 3655, 3656, 3657, 3658, 3659, 3660, 3661, 3662, or 3663, wherein the 3′ PEgRNA comprises a spacer comprising nucleotides 5-20 of sequence number 1900, 1918, 1403, 1936, 2263, 2353, 1503, 2281, 2673, 1525, 2299, 2317, 1864, 1359, 2335, 1882, or 1381 respectively in the same order, and wherein x is any integer from 1 to 31. Preferably, the 3′ PEgRNA comprises a “clean deletion” RTT, for example, an RTT selected from Table 40 that has a Pairing 5′ spacer number that is 12. Each 5′ PEgRNA is assigned a RTT pairing number, which corresponds to a pairing 3′ spacer number in Table 39. The 5′ PEgRNA can be used in a dual prime editing system or composition with a 3′ PEgRNA comprising a spacer of the same pairing 3′ spacer number.

### Tables 13A and 13B

[0678] Tables 13A and 13B provide exemplary 5′ PEgRNAs and components that can be used with any prime editor containing a Cas9 protein capable of recognizing a NGG PAM sequence, wherein N is A, G, C, or T. The PEgRNAs exemplified in Tables 13A and 13B comprise: (a) a spacer comprising at its 3′ end a sequence corresponding to nucleotides 5-20 of sequence number 929, (b) a gRNA core capable of binding to a Cas9 protein, and (c) an extension arm comprising (i) an editing template and (ii) a primer binding site (PBS) comprising at its 5′ end the sequence corresponding to sequence number 944.

[0679] The PEgRNA spacer can be, for example, 16-22 nucleotides in length. In some embodiments, the PEgNA spacer is 16-20 nucleotides in length. In some embodiments, the PEgRNA spacer comprises nucleotides 5-20, 4-20, 3-20, 2-20, or 1-20 of sequence number 929. In some embodiments, the PEgRNA spacer comprises the sequence of sequence number 929. In some embodiments, the PEgRNA spacer is 20 nucleotides in length. Any of these spacers exemplified can be referred to as 5′ spacer No. 13.

[0680] The PBS can be, for example, 3 to 19 nucleotides in length. In some embodiments, the PBS is 3 to 17 nucleotides in length and corresponds to a PBS sequence in Table 13A. In some cases, a PBS length of no more than 3 nucleotides less than the PEgRNA spacer length is chosen.

[0681] The 5′ PEgRNAs of Tables 13A and 13B can be used in a dual prime editing system or composition further comprising any suitable 3′ PEgRNA. The prime editing system can be used, e.g., for editing a DMPK gene harboring 50 or more CTG repeats in the DMPK gene.

[0682] In some embodiments, a prime editing composition comprises a 5′ PEgRNA or component thereof exemplified in Tables 13A and 13B and a 3′ PEgRNA, wherein the editing template of the 5′ PEgRNA and the 3′ PEgRNA each comprises a region of complementarity to each other. For example, the editing template of the 5′ PEgRNA can comprise any of the RTT sequences provided in Table 37. The terms editing template and RTT may be used interchangeably. Each of the RTT sequences in Table 37 is assigned a RTT pairing number that reflects the complementarity relationship between a 5′ RTT and a 3′ RTT. The 5′ PEgRNA can be used in a dual prime editing system that further comprises a 3′ PEgRNA, e.g., a 3′ PEgRNA having a spacer sequence and a corresponding PBS as exemplified in Tables 20A-36B, wherein the 3′ PEgRNA comprises an editing template comprising a RTT sequence having a region of complementarity to the 5′ RTT. The 3′ RTT can comprise any of the RTT sequences provided in Table 38, wherein the 3′ RTT sequence has the same RTT Pairing number as that of the 5′ RTT. The editing template of the 5′ PEgRNA and the 3′ PEgRNA can be completely complementary to each other, wherein the 5′ editing template and the 3′ editing template have the same length and perfect complementarity to each other. Alternatively, the 5′ editing template can comprise a region of complementarity to the 3′ editing template, and further comprise a non-complementary region to the 3′ editing template. The 3′ editing template can comprise a region of complementarity to the 5′ editing template, and further comprise a non-complementary region to the 5′ editing template. The non-complementary region can be at the 5′ end or the 3′ end of the editing templates. Contacting the target DMPK gene with the prime editing system can result in deletion of the sequence between the 5′ PEgRNA nick and the 3′ PEgRNA nick (the IND) and insertion of the region of complementarity between the 5′ editing template and the 3′ editing template (the OD), or insertion of the region of complementarity between the 5′ editing template and the 3′ editing template as well as the non-complementarity regions (the RD), and hence replace the CTG expansion with the sequence of the OD or the RD. Each of the 5′ PEgRNA is assigned a RTT pairing number, and can be used in a dual prime editing composition with a 3′ PEgRNA comprising an RTT having the same RTT pairing number.

[0683] In some embodiments, a prime editing composition comprises a 5′ PEgRNA or component thereof exemplified in Tables 13A and 13B and a 3′ PEgRNA, wherein the editing template of the 5′ PEgRNA comprises a region of identity to the spacer of the 3′ PEgRNA. In some embodiments, the editing template of the 3′ PEgRNA comprises a region of identity to the spacer of the 5′ PEgRNA. In some embodiments, the 5′ editing template comprises a region of complementarity to a region on the second strand of the DMPK gene that is directly 3′ to nucleotide 3 of the search target sequence of the 3′ PEgRNA. In some embodiments, the 3′ editing template comprises a region of complementarity to a region on the first strand of the DMPK gene that is directly 3′ to nucleotide 3 of the search target sequence of the 5′ PEgRNA. For example, the extension arm of the 5′ PEgRNA can comprise an editing template comprising the sequence of any of the RTT sequences provided in Table 39. Each of the RTT sequences in Table 39 is assigned a pairing 3′ spacer number. The 5′ PEgRNA can be used in a dual prime editing system with a 3′ PEgRNA, wherein the 3′ PEgRNA comprises a spacer that has the Pairing 3′ spacer number assigned to the 5′ RTT in Table 39. Contacting the target DMPK gene with the prime editing system can result in deletion of the sequence between the 5′ PEgRNA nick and the 3′ PEgRNA nick (the IND) without insertion of any exogenous sequence (a “clean deletion”). Alternatively, the 5′ editing template and the 3′ editing template can further comprise a region of complementarity to each other, and the region of complementarity can replace the IND in the DMPK gene. For example, in some embodiments, the 5′ PEgRNA is part of a dual prime editing composition that further comprises a 3′ PEgRNA, wherein the 5′ PEgRNA comprises a RTT comprising a sequence selected from sequence numbers 3459-3461 and 3467-3471, and the 3′ PEgRNA comprises a spacer comprising nucleotides 5-20 of sequence number 1525. In some embodiments, the 5′ PEgRNA is part of a dual prime editing composition that further comprises a 3′ PEgRNA, wherein the 5′ PEgRNA comprises a RTT comprising a sequence selected from sequence numbers 3462-3466, and the 3′ PEgRNA comprises a spacer comprising nucleotides 5-20 of sequence number 2353. In some embodiments, the 5′ PEgRNA is part of a dual prime editing composition that further comprises a 3′ PEgRNA, wherein the 5′ PEgRNA comprises a RTT comprising a sequence selected from sequence numbers 3472-3476, and the 3′ PEgRNA comprises a spacer comprising nucleotides 5-20 of sequence number 1936. In some embodiments, the 5′ PEgRNA is part of a dual prime editing composition that further comprises a 3′ PEgRNA, wherein the 5′ PEgRNA comprises a RTT comprising nucleotides x-40 of sequence number 3647, 3648, 3649, 3650, 3651, 3652, 3653, 3654, 3655, 3656, 3657, 3658, 3659, 3660, 3661, 3662, or 3663, wherein the 3′ PEgRNA comprises a spacer comprising nucleotides 5-20 of sequence number 1900, 1918, 1403, 1936, 2263, 2353, 1503, 2281, 2673, 1525, 2299, 2317, 1864, 1359, 2335, 1882, or 1381 respectively in the same order, and wherein x is any integer from 1 to 31. Preferably, the 3′ PEgRNA comprises a “clean deletion” RTT, for example, an RTT selected from Table 40 that has a Pairing 5′ spacer number that is 13. Each 5′ PEgRNA is assigned a RTT pairing number, which corresponds to a pairing 3′ spacer number in Table 39. The 5′ PEgRNA can be used in a dual prime editing system or composition with a 3′ PEgRNA comprising a spacer of the same pairing 3′ spacer number.

### Tables 14A and 14B

[0684] Tables 14A and 14B provide exemplary 5′ PEgRNAs and components that can be used with any prime editor containing a Cas9 protein capable of recognizing a NGG PAM sequence, wherein N is A, G, C, or T. The PEgRNAs exemplified in Tables 14A and 14B comprise: (a) a spacer comprising at its 3′ end a sequence corresponding to nucleotides 5-20 of sequence number 947, (b) a gRNA core capable of binding to a Cas9 protein, and (c) an extension arm comprising (i) an editing template and (ii) a primer binding site (PBS) comprising at its 5′ end the sequence corresponding to sequence number 962.

[0685] The PEgRNA spacer can be, for example, 16-22 nucleotides in length. In some embodiments, the PEgNA spacer is 16-20 nucleotides in length. In some embodiments, the PEgRNA spacer comprises nucleotides 5-20, 4-20, 3-20, 2-20, or 1-20 of sequence number 947. In some embodiments, the PEgRNA spacer comprises the sequence of sequence number 947. In some embodiments, the PEgRNA spacer is 20 nucleotides in length. Any of these spacers exemplified can be referred to as 5′ spacer No. 14.

[0686] The PBS can be, for example, 3 to 19 nucleotides in length. In some embodiments, the PBS is 3 to 17 nucleotides in length and corresponds to a PBS sequence in Table 14A. In some cases, a PBS length of no more than 3 nucleotides less than the PEgRNA spacer length is chosen.

[0687] The 5′ PEgRNAs of Tables 14A and 14B can be used in a dual prime editing system or composition further comprising any suitable 3′ PEgRNA. The prime editing system can be used, e.g., for editing a DMPK gene harboring 50 or more CTG repeats in the DMPK gene.

[0688] In some embodiments, a prime editing composition comprises a 5′ PEgRNA or component thereof exemplified in Tables 14A and 14B and a 3′ PEgRNA, wherein the editing template of the 5′ PEgRNA and the 3′ PEgRNA each comprises a region of complementarity to each other. For example, the editing template of the 5′ PEgRNA can comprise any of the RTT sequences provided in Table 37. The terms editing template and RTT may be used interchangeably. Each of the RTT sequences in Table 37 is assigned a RTT pairing number that reflects the complementarity relationship between a 5′ RTT and a 3′ RTT. The 5′ PEgRNA can be used in a dual prime editing system that further comprises a 3′ PEgRNA, e.g., a 3′ PEgRNA having a spacer sequence and a corresponding PBS as exemplified in Tables 20A-36B, wherein the 3′ PEgRNA comprises an editing template comprising a RTT sequence having a region of complementarity to the 5′ RTT. The 3′ RTT can comprise any of the RTT sequences provided in Table 38, wherein the 3′ RTT sequence has the same RTT Pairing number as that of the 5′ RTT. The editing template of the 5′ PEgRNA and the 3′ PEgRNA can be completely complementary to each other, wherein the 5′ editing template and the 3′ editing template have the same length and perfect complementarity to each other. Alternatively, the 5′ editing template can comprise a region of complementarity to the 3′ editing template, and further comprise a non-complementary region to the 3′ editing template. The 3′ editing template can comprise a region of complementarity to the 5′ editing template, and further comprise a non-complementary region to the 5′ editing template. The non-complementary region can be at the 5′ end or the 3′ end of the editing templates. Contacting the target DMPK gene with the prime editing system can result in deletion of the sequence between the 5′ PEgRNA nick and the 3′ PEgRNA nick (the IND) and insertion of the region of complementarity between the 5′ editing template and the 3′ editing template (the OD), or insertion of the region of complementarity between the 5′ editing template and the 3′ editing template as well as the non-complementarity regions (the RD), and hence replace the CTG expansion with the sequence of the OD or the RD. Each of the 5′ PEgRNA is assigned a RTT pairing number, and can be used in a dual prime editing composition with a 3′ PEgRNA comprising an RTT having the same RTT pairing number.

[0689] In some embodiments, a prime editing composition comprises a 5′ PEgRNA or component thereof exemplified in Tables 14A and 14B and a 3′ PEgRNA, wherein the editing template of the 5′ PEgRNA comprises a region of identity to the spacer of the 3′ PEgRNA. In some embodiments, the editing template of the 3′ PEgRNA comprises a region of identity to the spacer of the 5′ PEgRNA. In some embodiments, the 5′ editing template comprises a region of complementarity to a region on the second strand of the DMPK gene that is directly 3′ to nucleotide 3 of the search target sequence of the 3′ PEgRNA. In some embodiments, the 3′ editing template comprises a region of complementarity to a region on the first strand of the DMPK gene that is directly 3′ to nucleotide 3 of the search target sequence of the 5′ PEgRNA. For example, the extension arm of the 5′ PEgRNA can comprise an editing template comprising the sequence of any of the RTT sequences provided in Table 39. Each of the RTT sequences in Table 39 is assigned a pairing 3′ spacer number. The 5′ PEgRNA can be used in a dual prime editing system with a 3′ PEgRNA, wherein the 3′ PEgRNA comprises a spacer that has the Pairing 3′ spacer number assigned to the 5′ RTT in Table 39. Contacting the target DMPK gene with the prime editing system can result in deletion of the sequence between the 5′ PEgRNA nick and the 3′ PEgRNA nick (the IND) without insertion of any exogenous sequence (a “clean deletion”). Alternatively, the 5′ editing template and the 3′ editing template can further comprise a region of complementarity to each other, and the region of complementarity can replace the IND in the DMPK gene. For example, in some embodiments, the 5′ PEgRNA is part of a dual prime editing composition that further comprises a 3′ PEgRNA, wherein the 5′ PEgRNA comprises a RTT comprising a sequence selected from sequence numbers 3459-3461 and 3467-3471, and the 3′ PEgRNA comprises a spacer comprising nucleotides 5-20 of sequence number 1525. In some embodiments, the 5′ PEgRNA is part of a dual prime editing composition that further comprises a 3′ PEgRNA, wherein the 5′ PEgRNA comprises a RTT comprising a sequence selected from sequence numbers 3462-3466, and the 3′ PEgRNA comprises a spacer comprising nucleotides 5-20 of sequence number 2353. In some embodiments, the 5′ PEgRNA is part of a dual prime editing composition that further comprises a 3′ PEgRNA, wherein the 5′ PEgRNA comprises a RTT comprising a sequence selected from sequence numbers 3472-3476, and the 3′ PEgRNA comprises a spacer comprising nucleotides 5-20 of sequence number 1936. In some embodiments, the 5′ PEgRNA is part of a dual prime editing composition that further comprises a 3′ PEgRNA, wherein the 5′ PEgRNA comprises a RTT comprising nucleotides x-40 of sequence number 3647, 3648, 3649, 3650, 3651, 3652, 3653, 3654, 3655, 3656, 3657, 3658, 3659, 3660, 3661, 3662, or 3663, wherein the 3′ PEgRNA comprises a spacer comprising nucleotides 5-20 of sequence number 1900, 1918, 1403, 1936, 2263, 2353, 1503, 2281, 2673, 1525, 2299, 2317, 1864, 1359, 2335, 1882, or 1381 respectively in the same order, and wherein x is any integer from 1 to 31. Preferably, the 3′ PEgRNA comprises a “clean deletion” RTT, for example, an RTT selected from Table 40 that has a Pairing 5′ spacer number that is 14. Each 5′ PEgRNA is assigned a RTT pairing number, which corresponds to a pairing 3′ spacer number in Table 39. The 5′ PEgRNA can be used in a dual prime editing system or composition with a 3′ PEgRNA comprising a spacer of the same pairing 3′ spacer number.

### Tables 15A and 15B

[0690] Tables 15A and 15B provide exemplary 5′ PEgRNAs and components that can be used with any prime editor containing a Cas9 protein capable of recognizing a NGG PAM sequence, wherein N is A, G, C, or T. The PEgRNAs exemplified in Tables 15A and 15B comprise: (a) a spacer comprising at its 3′ end a sequence corresponding to nucleotides 5-20 of sequence number 965, (b) a gRNA core capable of binding to a Cas9 protein, and (c) an extension arm comprising (i) an editing template and (ii) a primer binding site (PBS) comprising at its 5′ end the sequence corresponding to sequence number 980.

[0691] The PEgRNA spacer can be, for example, 16-22 nucleotides in length. In some embodiments, the PEgNA spacer is 16-20 nucleotides in length. In some embodiments, the PEgRNA spacer comprises nucleotides 5-20, 4-20, 3-20, 2-20, or 1-20 of sequence number 965. In some embodiments, the PEgRNA spacer comprises the sequence of sequence number 965. In some embodiments, the PEgRNA spacer is 20 nucleotides in length. Any of these spacers exemplified can be referred to as 5′ spacer No. 15.

[0692] The PBS can be, for example, 3 to 19 nucleotides in length. In some embodiments, the PBS is 3 to 17 nucleotides in length and corresponds to a PBS sequence in Table 15A. In some cases, a PBS length of no more than 3 nucleotides less than the PEgRNA spacer length is chosen.

[0693] The 5′ PEgRNAs of Tables 15A and 15B can be used in a dual prime editing system or composition further comprising any suitable 3′ PEgRNA. The prime editing system can be used, e.g., for editing a DMPK gene harboring 50 or more CTG repeats in the DMPK gene.

[0694] In some embodiments, a prime editing composition comprises a 5′ PEgRNA or component thereof exemplified in Tables 15A and 15B and a 3′ PEgRNA, wherein the editing template of the 5′ PEgRNA and the 3′ PEgRNA each comprises a region of complementarity to each other. For example, the editing template of the 5′ PEgRNA can comprise any of the RTT sequences provided in Table 37. The terms editing template and RTT may be used interchangeably. Each of the RTT sequences in Table 37 is assigned a RTT pairing number that reflects the complementarity relationship between a 5′ RTT and a 3′ RTT. The 5′ PEgRNA can be used in a dual prime editing system that further comprises a 3′ PEgRNA, e.g., a 3′ PEgRNA having a spacer sequence and a corresponding PBS as exemplified in Tables 20A-36B, wherein the 3′ PEgRNA comprises an editing template comprising a RTT sequence having a region of complementarity to the 5′ RTT. The 3′ RTT can comprise any of the RTT sequences provided in Table 38, wherein the 3′ RTT sequence has the same RTT Pairing number as that of the 5′ RTT. The editing template of the 5′ PEgRNA and the 3′ PEgRNA can be completely complementary to each other, wherein the 5′ editing template and the 3′ editing template have the same length and perfect complementarity to each other. Alternatively, the 5′ editing template can comprise a region of complementarity to the 3′ editing template, and further comprise a non-complementary region to the 3′ editing template. The 3′ editing template can comprise a region of complementarity to the 5′ editing template, and further comprise a non-complementary region to the 5′ editing template. The non-complementary region can be at the 5′ end or the 3′ end of the editing templates. Contacting the target DMPK gene with the prime editing system can result in deletion of the sequence between the 5′ PEgRNA nick and the 3′ PEgRNA nick (the IND) and insertion of the region of complementarity between the 5′ editing template and the 3′ editing template (the OD), or insertion of the region of complementarity between the 5′ editing template and the 3′ editing template as well as the non-complementarity regions (the RD), and hence replace the CTG expansion with the sequence of the OD or the RD. Each of the 5′ PEgRNA is assigned a RTT pairing number, and can be used in a dual prime editing composition with a 3′ PEgRNA comprising an RTT having the same RTT pairing number.

[0695] In some embodiments, a prime editing composition comprises a 5′ PEgRNA or component thereof exemplified in Tables 15A and 15B and a 3′ PEgRNA, wherein the editing template of the 5′ PEgRNA comprises a region of identity to the spacer of the 3′ PEgRNA. In some embodiments, the editing template of the 3′ PEgRNA comprises a region of identity to the spacer of the 5′ PEgRNA. In some embodiments, the 5′ editing template comprises a region of complementarity to a region on the second strand of the DMPK gene that is directly 3′ to nucleotide 3 of the search target sequence of the 3′ PEgRNA. In some embodiments, the 3′ editing template comprises a region of complementarity to a region on the first strand of the DMPK gene that is directly 3′ to nucleotide 3 of the search target sequence of the 5′ PEgRNA. For example, the extension arm of the 5′ PEgRNA can comprise an editing template comprising the sequence of any of the RTT sequences provided in Table 39. Each of the RTT sequences in Table 39 is assigned a pairing 3′ spacer number. The 5′ PEgRNA can be used in a dual prime editing system with a 3′ PEgRNA, wherein the 3′ PEgRNA comprises a spacer that has the Pairing 3′ spacer number assigned to the 5′ RTT in Table 39. Contacting the target DMPK gene with the prime editing system can result in deletion of the sequence between the 5′ PEgRNA nick and the 3′ PEgRNA nick (the IND) without insertion of any exogenous sequence (a “clean deletion”). Alternatively, the 5′ editing template and the 3′ editing template can further comprise a region of complementarity to each other, and the region of complementarity can replace the IND in the DMPK gene. For example, in some embodiments, the 5′ PEgRNA is part of a dual prime editing composition that further comprises a 3′ PEgRNA, wherein the 5′ PEgRNA comprises a RTT comprising a sequence selected from sequence numbers 3459-3461 and 3467-3471, and the 3′ PEgRNA comprises a spacer comprising nucleotides 5-20 of sequence number 1525. In some embodiments, the 5′ PEgRNA is part of a dual prime editing composition that further comprises a 3′ PEgRNA, wherein the 5′ PEgRNA comprises a RTT comprising a sequence selected from sequence numbers 3462-3466, and the 3′ PEgRNA comprises a spacer comprising nucleotides 5-20 of sequence number 2353. In some embodiments, the 5′ PEgRNA is part of a dual prime editing composition that further comprises a 3′ PEgRNA, wherein the 5′ PEgRNA comprises a RTT comprising a sequence selected from sequence numbers 3472-3476, and the 3′ PEgRNA comprises a spacer comprising nucleotides 5-20 of sequence number 1936. In some embodiments, the 5′ PEgRNA is part of a dual prime editing composition that further comprises a 3′ PEgRNA, wherein the 5′ PEgRNA comprises a RTT comprising nucleotides x-40 of sequence number 3647, 3648, 3649, 3650, 3651, 3652, 3653, 3654, 3655, 3656, 3657, 3658, 3659, 3660, 3661, 3662, or 3663, wherein the 3′ PEgRNA comprises a spacer comprising nucleotides 5-20 of sequence number 1900, 1918, 1403, 1936, 2263, 2353, 1503, 2281, 2673, 1525, 2299, 2317, 1864, 1359, 2335, 1882, or 1381 respectively in the same order, and wherein x is any integer from 1 to 31. Preferably, the 3′ PEgRNA comprises a “clean deletion” RTT, for example, an RTT selected from Table 40 that has a Pairing 5′ spacer number that is 15. Each 5′ PEgRNA is assigned a RTT pairing number, which corresponds to a pairing 3′ spacer number in Table 39. The 5′ PEgRNA can be used in a dual prime editing system or composition with a 3′ PEgRNA comprising a spacer of the same pairing 3′ spacer number.

### Tables 16A and 16B

[0696] Tables 16A and 16B provide exemplary 5′ PEgRNAs and components that can be used with any prime editor containing a Cas9 protein capable of recognizing a NGG PAM sequence, wherein N is A, G, C, or T. The PEgRNAs exemplified in Tables 16A and 16B comprise: (a) a spacer comprising at its 3′ end a sequence corresponding to nucleotides 5-20 of sequence number 983, (b) a gRNA core capable of binding to a Cas9 protein, and (c) an extension arm comprising (i) an editing template and (ii) a primer binding site (PBS) comprising at its 5′ end the sequence corresponding to sequence number 998.

[0697] The PEgRNA spacer can be, for example, 16-22 nucleotides in length. In some embodiments, the PEgNA spacer is 16-20 nucleotides in length. In some embodiments, the PEgRNA spacer comprises nucleotides 5-20, 4-20, 3-20, 2-20, or 1-20 of sequence number 983. In some embodiments, the PEgRNA spacer comprises the sequence of sequence number 983. In some embodiments, the PEgRNA spacer is 20 nucleotides in length. Any of these spacers exemplified can be referred to as 5′ spacer No. 16.

[0698] The PBS can be, for example, 3 to 19 nucleotides in length. In some embodiments, the PBS is 3 to 17 nucleotides in length and corresponds to a PBS sequence in Table 16A. In some cases, a PBS length of no more than 3 nucleotides less than the PEgRNA spacer length is chosen.

[0699] The 5′ PEgRNAs of Tables 16A and 16B can be used in a dual prime editing system or composition further comprising any suitable 3′ PEgRNA. The prime editing system can be used, e.g., for editing a DMPK gene harboring 50 or more CTG repeats in the DMPK gene.

[0700] In some embodiments, a prime editing composition comprises a 5′ PEgRNA or component thereof exemplified in Tables 16A and 16B and a 3′ PEgRNA, wherein the editing template of the 5′ PEgRNA and the 3′ PEgRNA each comprises a region of complementarity to each other. For example, the editing template of the 5′ PEgRNA can comprise any of the RTT sequences provided in Table 37. The terms editing template and RTT may be used interchangeably. Each of the RTT sequences in Table 37 is assigned a RTT pairing number that reflects the complementarity relationship between a 5′ RTT and a 3′ RTT. The 5′ PEgRNA can be used in a dual prime editing system that further comprises a 3′ PEgRNA, e.g., a 3′ PEgRNA having a spacer sequence and a corresponding PBS as exemplified in Tables 20A-36B, wherein the 3′ PEgRNA comprises an editing template comprising a RTT sequence having a region of complementarity to the 5′ RTT. The 3′ RTT can comprise any of the RTT sequences provided in Table 38, wherein the 3′ RTT sequence has the same RTT Pairing number as that of the 5′ RTT. The editing template of the 5′ PEgRNA and the 3′ PEgRNA can be completely complementary to each other, wherein the 5′ editing template and the 3′ editing template have the same length and perfect complementarity to each other. Alternatively, the 5′ editing template can comprise a region of complementarity to the 3′ editing template, and further comprise a non-complementary region to the 3′ editing template. The 3′ editing template can comprise a region of complementarity to the 5′ editing template, and further comprise a non-complementary region to the 5′ editing template. The non-complementary region can be at the 5′ end or the 3′ end of the editing templates. Contacting the target DMPK gene with the prime editing system can result in deletion of the sequence between the 5′ PEgRNA nick and the 3′ PEgRNA nick (the IND) and insertion of the region of complementarity between the 5′ editing template and the 3′ editing template (the OD), or insertion of the region of complementarity between the 5′ editing template and the 3′ editing template as well as the non-complementarity regions (the RD), and hence replace the CTG expansion with the sequence of the OD or the RD. Each of the 5′ PEgRNA is assigned a RTT pairing number, and can be used in a dual prime editing composition with a 3′ PEgRNA comprising an RTT having the same RTT pairing number.

[0701] In some embodiments, a prime editing composition comprises a 5′ PEgRNA or component thereof exemplified in Tables 16A and 16B and a 3′ PEgRNA, wherein the editing template of the 5′ PEgRNA comprises a region of identity to the spacer of the 3′ PEgRNA. In some embodiments, the editing template of the 3′ PEgRNA comprises a region of identity to the spacer of the 5′ PEgRNA. In some embodiments, the 5′ editing template comprises a region of complementarity to a region on the second strand of the DMPK gene that is directly 3′ to nucleotide 3 of the search target sequence of the 3′ PEgRNA. In some embodiments, the 3′ editing template comprises a region of complementarity to a region on the first strand of the DMPK gene that is directly 3′ to nucleotide 3 of the search target sequence of the 5′ PEgRNA. For example, the extension arm of the 5′ PEgRNA can comprise an editing template comprising the sequence of any of the RTT sequences provided in Table 39. Each of the RTT sequences in Table 39 is assigned a pairing 3′ spacer number. The 5′ PEgRNA can be used in a dual prime editing system with a 3′ PEgRNA, wherein the 3′ PEgRNA comprises a spacer that has the Pairing 3′ spacer number assigned to the 5′ RTT in Table 39. Contacting the target DMPK gene with the prime editing system can result in deletion of the sequence between the 5′ PEgRNA nick and the 3′ PEgRNA nick (the IND) without insertion of any exogenous sequence (a “clean deletion”). Alternatively, the 5′ editing template and the 3′ editing template can further comprise a region of complementarity to each other, and the region of complementarity can replace the IND in the DMPK gene. For example, in some embodiments, the 5′ PEgRNA is part of a dual prime editing composition that further comprises a 3′ PEgRNA, wherein the 5′ PEgRNA comprises a RTT comprising a sequence selected from sequence numbers 3459-3461 and 3467-3471, and the 3′ PEgRNA comprises a spacer comprising nucleotides 5-20 of sequence number 1525. In some embodiments, the 5′ PEgRNA is part of a dual prime editing composition that further comprises a 3′ PEgRNA, wherein the 5′ PEgRNA comprises a RTT comprising a sequence selected from sequence numbers 3462-3466, and the 3′ PEgRNA comprises a spacer comprising nucleotides 5-20 of sequence number 2353. In some embodiments, the 5′ PEgRNA is part of a dual prime editing composition that further comprises a 3′ PEgRNA, wherein the 5′ PEgRNA comprises a RTT comprising a sequence selected from sequence numbers 3472-3476, and the 3′ PEgRNA comprises a spacer comprising nucleotides 5-20 of sequence number 1936. In some embodiments, the 5′ PEgRNA is part of a dual prime editing composition that further comprises a 3′ PEgRNA, wherein the 5′ PEgRNA comprises a RTT comprising nucleotides x-40 of sequence number 3647, 3648, 3649, 3650, 3651, 3652, 3653, 3654, 3655, 3656, 3657, 3658, 3659, 3660, 3661, 3662, or 3663, wherein the 3′ PEgRNA comprises a spacer comprising nucleotides 5-20 of sequence number 1900, 1918, 1403, 1936, 2263, 2353, 1503, 2281, 2673, 1525, 2299, 2317, 1864, 1359, 2335, 1882, or 1381 respectively in the same order, and wherein x is any integer from 1 to 31. Preferably, the 3′ PEgRNA comprises a “clean deletion” RTT, for example, an RTT selected from Table 40 that has a Pairing 5′ spacer number that is 16. Each 5′ PEgRNA is assigned a RTT pairing number, which corresponds to a pairing 3′ spacer number in Table 39. The 5′ PEgRNA can be used in a dual prime editing system or composition with a 3′ PEgRNA comprising a spacer of the same pairing 3′ spacer number.

### Tables 17A and 17B

[0702] Tables 17A and 17B provide exemplary 5′ PEgRNAs and components that can be used with any prime editor containing a Cas9 protein capable of recognizing a NGG PAM sequence, wherein N is A, G, C, or T. The PEgRNAs exemplified in Tables 17A and 17B comprise: (a) a spacer comprising at its 3′ end a sequence corresponding to nucleotides 5-20 of sequence number 1001, (b) a gRNA core capable of binding to a Cas9 protein, and (c) an extension arm comprising (i) an editing template and (ii) a primer binding site (PBS) comprising at its 5′ end the sequence corresponding to sequence number 1016.

[0703] The PEgRNA spacer can be, for example, 16-22 nucleotides in length. In some embodiments, the PEgNA spacer is 16-20 nucleotides in length. In some embodiments, the PEgRNA spacer comprises nucleotides 5-20, 4-20, 3-20, 2-20, or 1-20 of sequence number 1001. In some embodiments, the PEgRNA spacer comprises the sequence of sequence number 1001. In some embodiments, the PEgRNA spacer is 20 nucleotides in length. Any of these spacers exemplified can be referred to as 5′ spacer No. 17.

[0704] The PBS can be, for example, 3 to 19 nucleotides in length. In some embodiments, the PBS is 3 to 17 nucleotides in length and corresponds to a PBS sequence in Table 17A. In some cases, a PBS length of no more than 3 nucleotides less than the PEgRNA spacer length is chosen.

[0705] The 5′ PEgRNAs of Tables 17A and 17B can be used in a dual prime editing system or composition further comprising any suitable 3′ PEgRNA. The prime editing system can be used, e.g., for editing a DMPK gene harboring 50 or more CTG repeats in the DMPK gene.

[0706] In some embodiments, a prime editing composition comprises a 5′ PEgRNA or component thereof exemplified in Tables 17A and 17B and a 3′ PEgRNA, wherein the editing template of the 5′ PEgRNA and the 3′ PEgRNA each comprises a region of complementarity to each other. For example, the editing template of the 5′ PEgRNA can comprise any of the RTT sequences provided in Table 37. The terms editing template and RTT may be used interchangeably. Each of the RTT sequences in Table 37 is assigned a RTT pairing number that reflects the complementarity relationship between a 5′ RTT and a 3′ RTT. The 5′ PEgRNA can be used in a dual prime editing system that further comprises a 3′ PEgRNA, e.g., a 3′ PEgRNA having a spacer sequence and a corresponding PBS as exemplified in Tables 20A-36B, wherein the 3′ PEgRNA comprises an editing template comprising a RTT sequence having a region of complementarity to the 5′ RTT. The 3′ RTT can comprise any of the RTT sequences provided in Table 38, wherein the 3′ RTT sequence has the same RTT Pairing number as that of the 5′ RTT. The editing template of the 5′ PEgRNA and the 3′ PEgRNA can be completely complementary to each other, wherein the 5′ editing template and the 3′ editing template have the same length and perfect complementarity to each other. Alternatively, the 5′ editing template can comprise a region of complementarity to the 3′ editing template, and further comprise a non-complementary region to the 3′ editing template. The 3′ editing template can comprise a region of complementarity to the 5′ editing template, and further comprise a non-complementary region to the 5′ editing template. The non-complementary region can be at the 5′ end or the 3′ end of the editing templates. Contacting the target DMPK gene with the prime editing system can result in deletion of the sequence between the 5′ PEgRNA nick and the 3′ PEgRNA nick (the IND) and insertion of the region of complementarity between the 5′ editing template and the 3′ editing template (the OD), or insertion of the region of complementarity between the 5′ editing template and the 3′ editing template as well as the non-complementarity regions (the RD), and hence replace the CTG expansion with the sequence of the OD or the RD. Each of the 5′ PEgRNA is assigned a RTT pairing number, and can be used in a dual prime editing composition with a 3′ PEgRNA comprising an RTT having the same RTT pairing number.

[0707] In some embodiments, a prime editing composition comprises a 5′ PEgRNA or component thereof exemplified in Tables 17A and 17B and a 3′ PEgRNA, wherein the editing template of the 5′ PEgRNA comprises a region of identity to the spacer of the 3′ PEgRNA. In some embodiments, the editing template of the 3′ PEgRNA comprises a region of identity to the spacer of the 5′ PEgRNA. In some embodiments, the 5′ editing template comprises a region of complementarity to a region on the second strand of the DMPK gene that is directly 3′ to nucleotide 3 of the search target sequence of the 3′ PEgRNA. In some embodiments, the 3′ editing template comprises a region of complementarity to a region on the first strand of the DMPK gene that is directly 3′ to nucleotide 3 of the search target sequence of the 5′ PEgRNA. For example, the extension arm of the 5′ PEgRNA can comprise an editing template comprising the sequence of any of the RTT sequences provided in Table 39. Each of the RTT sequences in Table 39 is assigned a pairing 3′ spacer number. The 5′ PEgRNA can be used in a dual prime editing system with a 3′ PEgRNA, wherein the 3′ PEgRNA comprises a spacer that has the Pairing 3′ spacer number assigned to the 5′ RTT in Table 39. Contacting the target DMPK gene with the prime editing system can result in deletion of the sequence between the 5′ PEgRNA nick and the 3′ PEgRNA nick (the IND) without insertion of any exogenous sequence (a “clean deletion”). Alternatively, the 5′ editing template and the 3′ editing template can further comprise a region of complementarity to each other, and the region of complementarity can replace the IND in the DMPK gene. For example, in some embodiments, the 5′ PEgRNA is part of a dual prime editing composition that further comprises a 3′ PEgRNA, wherein the 5′ PEgRNA comprises a RTT comprising a sequence selected from sequence numbers 3459-3461 and 3467-3471, and the 3′ PEgRNA comprises a spacer comprising nucleotides 5-20 of sequence number 1525. In some embodiments, the 5′ PEgRNA is part of a dual prime editing composition that further comprises a 3′ PEgRNA, wherein the 5′ PEgRNA comprises a RTT comprising a sequence selected from sequence numbers 3462-3466, and the 3′ PEgRNA comprises a spacer comprising nucleotides 5-20 of sequence number 2353. In some embodiments, the 5′ PEgRNA is part of a dual prime editing composition that further comprises a 3′ PEgRNA, wherein the 5′ PEgRNA comprises a RTT comprising a sequence selected from sequence numbers 3472-3476, and the 3′ PEgRNA comprises a spacer comprising nucleotides 5-20 of sequence number 1936. In some embodiments, the 5′ PEgRNA is part of a dual prime editing composition that further comprises a 3′ PEgRNA, wherein the 5′ PEgRNA comprises a RTT comprising nucleotides x-40 of sequence number 3647, 3648, 3649, 3650, 3651, 3652, 3653, 3654, 3655, 3656, 3657, 3658, 3659, 3660, 3661, 3662, or 3663, wherein the 3′ PEgRNA comprises a spacer comprising nucleotides 5-20 of sequence number 1900, 1918, 1403, 1936, 2263, 2353, 1503, 2281, 2673, 1525, 2299, 2317, 1864, 1359, 2335, 1882, or 1381 respectively in the same order, and wherein x is any integer from 1 to 31. Preferably, the 3′ PEgRNA comprises a “clean deletion” RTT, for example, an RTT selected from Table 40 that has a Pairing 5′ spacer number that is 17. Each 5′ PEgRNA is assigned a RTT pairing number, which corresponds to a pairing 3′ spacer number in Table 39. The 5′ PEgRNA can be used in a dual prime editing system or composition with a 3′ PEgRNA comprising a spacer of the same pairing 3′ spacer number.

### Tables 19A and 19B

[0708] Tables 19A and 19B provide exemplary 5′ PEgRNAs and components that can be used with any prime editor containing a Cas9 protein capable of recognizing a NGG PAM sequence, wherein N is A, G, C, or T. The PEgRNAs exemplified in Tables 19A and 19B comprise: (a) a spacer comprising at its 3′ end a sequence corresponding to nucleotides 5-20 of sequence number 1341, (b) a gRNA core capable of binding to a Cas9 protein, and (c) an extension arm comprising (i) an editing template and (ii) a primer binding site (PBS) comprising at its 5′ end the sequence corresponding to sequence number 1356.

[0709] The PEgRNA spacer can be, for example, 16-22 nucleotides in length. In some embodiments, the PEgNA spacer is 16-20 nucleotides in length. In some embodiments, the PEgRNA spacer comprises nucleotides 5-20, 4-20, 3-20, 2-20, or 1-20 of sequence number 1341. In some embodiments, the PEgRNA spacer comprises the sequence of sequence number 1341. In some embodiments, the PEgRNA spacer is 20 nucleotides in length. Any of these spacers exemplified can be referred to as 5′ spacer No. 19.

[0710] The PBS can be, for example, 3 to 19 nucleotides in length. In some embodiments, the PBS is 3 to 17 nucleotides in length and corresponds to a PBS sequence in Table 19A. In some cases, a PBS length of no more than 3 nucleotides less than the PEgRNA spacer length is chosen.

[0711] The 5′ PEgRNAs of Tables 19A and 19B can be used in a dual prime editing system or composition further comprising any suitable 3′ PEgRNA. The prime editing system can be used, e.g., for editing a DMPK gene harboring 50 or more CTG repeats in the DMPK gene.

[0712] In some embodiments, a prime editing composition comprises a 5′ PEgRNA or component thereof exemplified in Tables 19A and 19B and a 3′ PEgRNA, wherein the editing template of the 5′ PEgRNA and the 3′ PEgRNA each comprises a region of complementarity to each other. For example, the editing template of the 5′ PEgRNA can comprise any of the RTT sequences provided in Table 37. The terms editing template and RTT may be used interchangeably. Each of the RTT sequences in Table 37 is assigned a RTT pairing number that reflects the complementarity relationship between a 5′ RTT and a 3′ RTT. The 5′ PEgRNA can be used in a dual prime editing system that further comprises a 3′ PEgRNA, e.g., a 3′ PEgRNA having a spacer sequence and a corresponding PBS as exemplified in Tables 20A-36B, wherein the 3′ PEgRNA comprises an editing template comprising a RTT sequence having a region of complementarity to the 5′ RTT. The 3′ RTT can comprise any of the RTT sequences provided in Table 38, wherein the 3′ RTT sequence has the same RTT Pairing number as that of the 5′ RTT. The editing template of the 5′ PEgRNA and the 3′ PEgRNA can be completely complementary to each other, wherein the 5′ editing template and the 3′ editing template have the same length and perfect complementarity to each other. Alternatively, the 5′ editing template can comprise a region of complementarity to the 3′ editing template, and further comprise a non-complementary region to the 3′ editing template. The 3′ editing template can comprise a region of complementarity to the 5′ editing template, and further comprise a non-complementary region to the 5′ editing template. The non-complementary region can be at the 5′ end or the 3′ end of the editing templates. Contacting the target DMPK gene with the prime editing system can result in deletion of the sequence between the 5′ PEgRNA nick and the 3′ PEgRNA nick (the IND) and insertion of the region of complementarity between the 5′ editing template and the 3′ editing template (the OD), or insertion of the region of complementarity between the 5′ editing template and the 3′ editing template as well as the non-complementarity regions (the RD), and hence replace the CTG expansion with the sequence of the OD or the RD. Each of the 5′ PEgRNA is assigned a RTT pairing number, and can be used in a dual prime editing composition with a 3′ PEgRNA comprising an RTT having the same RTT pairing number.

[0713] In some embodiments, a prime editing composition comprises a 5′ PEgRNA or component thereof exemplified in Tables 19A and 19B and a 3′ PEgRNA, wherein the editing template of the 5′ PEgRNA comprises a region of identity to the spacer of the 3′ PEgRNA. In some embodiments, the editing template of the 3′ PEgRNA comprises a region of identity to the spacer of the 5′ PEgRNA. In some embodiments, the 5′ editing template comprises a region of complementarity to a region on the second strand of the DMPK gene that is directly 3′ to nucleotide 3 of the search target sequence of the 3′ PEgRNA. In some embodiments, the 3′ editing template comprises a region of complementarity to a region on the first strand of the DMPK gene that is directly 3′ to nucleotide 3 of the search target sequence of the 5′ PEgRNA. For example, the extension arm of the 5′ PEgRNA can comprise an editing template comprising the sequence of any of the RTT sequences provided in Table 39. Each of the RTT sequences in Table 39 is assigned a pairing 3′ spacer number. The 5′ PEgRNA can be used in a dual prime editing system with a 3′ PEgRNA, wherein the 3′ PEgRNA comprises a spacer that has the Pairing 3′ spacer number assigned to the 5′ RTT in Table 39. Contacting the target DMPK gene with the prime editing system can result in deletion of the sequence between the 5′ PEgRNA nick and the 3′ PEgRNA nick (the IND) without insertion of any exogenous sequence (a “clean deletion”). Alternatively, the 5′ editing template and the 3′ editing template can further comprise a region of complementarity to each other, and the region of complementarity can replace the IND in the DMPK gene. For example, in some embodiments, the 5′ PEgRNA is part of a dual prime editing composition that further comprises a 3′ PEgRNA, wherein the 5′ PEgRNA comprises a RTT comprising a sequence selected from sequence numbers 3459-3461 and 3467-3471, and the 3′ PEgRNA comprises a spacer comprising nucleotides 5-20 of sequence number 1525. In some embodiments, the 5′ PEgRNA is part of a dual prime editing composition that further comprises a 3′ PEgRNA, wherein the 5′ PEgRNA comprises a RTT comprising a sequence selected from sequence numbers 3462-3466, and the 3′ PEgRNA comprises a spacer comprising nucleotides 5-20 of sequence number 2353. In some embodiments, the 5′ PEgRNA is part of a dual prime editing composition that further comprises a 3′ PEgRNA, wherein the 5′ PEgRNA comprises a RTT comprising a sequence selected from sequence numbers 3472-3476, and the 3′ PEgRNA comprises a spacer comprising nucleotides 5-20 of sequence number 1936. In some embodiments, the 5′ PEgRNA is part of a dual prime editing composition that further comprises a 3′ PEgRNA, wherein the 5′ PEgRNA comprises a RTT comprising nucleotides x-40 of sequence number 3647, 3648, 3649, 3650, 3651, 3652, 3653, 3654, 3655, 3656, 3657, 3658, 3659, 3660, 3661, 3662, or 3663, wherein the 3′ PEgRNA comprises a spacer comprising nucleotides 5-20 of sequence number 1900, 1918, 1403, 1936, 2263, 2353, 1503, 2281, 2673, 1525, 2299, 2317, 1864, 1359, 2335, 1882, or 1381 respectively in the same order, and wherein x is any integer from 1 to 31. Preferably, the 3′ PEgRNA comprises a “clean deletion” RTT, for example, an RTT selected from Table 40 that has a Pairing 5′ spacer number that is 19. Each 5′ PEgRNA is assigned a RTT pairing number, which corresponds to a pairing 3′ spacer number in Table 39. The 5′ PEgRNA can be used in a dual prime editing system or composition with a 3′ PEgRNA comprising a spacer of the same pairing 3′ spacer number.

### Tables 20A and 20B

[0714] Tables 20A and 20B provide exemplary 3′ PEgRNAs and components that can be used with any prime editor containing a Cas9 protein capable of recognizing a NGG PAM sequence, wherein N is A, G, C, or T. The PEgRNAs exemplified in Tables 20A and 20B comprise: (a) a spacer comprising at its 3′ end a sequence corresponding to nucleotides 5-20 of sequence number 1359, (b) a gRNA core capable of binding to a Cas9 protein, and (c) an extension arm comprising (i) an editing template and (ii) a primer binding site (PBS) comprising at its 5′ end the sequence corresponding to sequence number 1374.

[0715] The PEgRNA spacer can be, for example, 16-22 nucleotides in length. In some embodiments, the PEgNA spacer is 16-20 nucleotides in length. In some embodiments, the PEgRNA spacer comprises nucleotides 5-20, 4-20, 3-20, 2-20, or 1-20 of sequence number 1359. In some embodiments, the PEgRNA spacer comprises the sequence of sequence number 1359. In some embodiments, the PEgRNA spacer is 20 nucleotides in length. Any of these spacers exemplified can be referred to as 3′ spacer No. 1.

[0716] The PBS can be, for example, 3 to 19 nucleotides in length. In some embodiments, the PBS is 3 to 17 nucleotides in length and corresponds to a PBS sequence in Table 20A. In some cases, a PBS length of no more than 3 nucleotides less than the PEgRNA spacer length is chosen.

[0717] The 3′ PEgRNAs of Tables 20A and 20B can be used in a dual prime editing system or composition further comprising any suitable 5′ PEgRNA. The prime editing system can be used, e.g., for editing a DMPK gene harboring 50 or more CTG repeats in the DMPK gene.

[0718] In some embodiments, a prime editing composition comprises a 3′ PEgRNA or component thereof exemplified in Tables 20A and 20B and a 5′ PEgRNA, wherein the editing template of the 3′ PEgRNA and the 5′ PEgRNA each comprises a region of complementarity to each other. For example, the editing template of the 3′ PEgRNA can comprise any of the RTT sequences provided in Table 38. The terms editing template and RTT may be used interchangeably. Each of the RTT sequences in Table 38 is assigned a RTT pairing number that reflects the complementarity relationship between a 5′ RTT and a 3′ RTT. The 3′ PEgRNA can be used in a dual prime editing system that further comprises a 5′ PEgRNA, e.g., a 5′ PEgRNA having a spacer sequence and a corresponding PBS as exemplified in Tables 1A-19B, wherein the 5′ PEgRNA comprises an editing template comprising a RTT sequence having a region of complementarity to the 3′ RTT. The 5′ RTT can comprise any of the RTT sequences provided in Table 37, wherein the 5′ RTT sequence has the same RTT Pairing number as that of the 3′ RTT. The editing template of the 5′ PEgRNA and the 3′ PEgRNA can be completely complementary to each other, wherein the 5′ editing template and the 3′ editing template have the same length and perfect complementarity to each other. Alternatively, the 5′ editing template can comprise a region of complementarity to the 3′ editing template, and further comprise a non-complementary region to the 3′ editing template. The 3′ editing template can comprise a region of complementarity to the 5′ editing template, and further comprise a non-complementary region to the 5′ editing template. The non-complementary region can be at the 5′ end or the 3′ end of the editing templates. Contacting the target DMPK gene with the prime editing system can result in deletion of the sequence between the 5′ PEgRNA nick and the 3′ PEgRNA nick (the IND) and insertion of the region of complementarity between the 5′ editing template and the 3′ editing template (the OD), or insertion of the region of complementarity between the 5′ editing template and the 3′ editing template as well as the non-complementarity regions (the RD), and hence replace the CTG expansion with the sequence of the OD or the RD. Each of the 3′ PEgRNA is assigned a RTT pairing number, and can be used in a dual prime editing composition with a 5′ PEgRNA comprising an RTT having the same RTT pairing number.

[0719] In some embodiments, a prime editing composition comprises a 3′ PEgRNA or component thereof exemplified in Tables 20A and 20B and a 5′ PEgRNA, wherein the editing template of the 3′ PEgRNA comprises a region of identity to the spacer of the 5′ PEgRNA. In some embodiments, the editing template of the 5′ PEgRNA comprises a region of identity to the spacer of the 3′ PEgRNA. In some embodiments, the 3′ editing template comprises a region of complementarity to a region on the first strand of the DMPK gene that is directly 3′ to nucleotide 3 of the search target sequence of the 5′ PEgRNA. In some embodiments, the 5′ editing template comprises a region of complementarity to a region on the second strand of the DMPK gene that is directly 3′ to nucleotide 3 of the search target sequence of the 3′ PEgRNA. For example, the extension arm of the 3′ PEgRNA can comprise an editing template comprising the sequence of any of the RTT sequences provided in Table 40. Each of the RTT sequences in Table 40 is assigned a pairing 5′ spacer number. The 3′ PEgRNA can be used in a dual prime editing system with a 5′ PEgRNA, wherein the 5′ PEgRNA comprises a spacer that has the Pairing 5′ spacer number assigned to the 3′ RTT in Table 40. Contacting the target DMPK gene with the prime editing system can result in deletion of the sequence between the 5′ PEgRNA nick and the 3′ PEgRNA nick (the IND) without insertion of any exogenous sequence (a “clean deletion”). Alternatively, the 5′ editing template and the 3′ editing template can further comprise a region of complementarity to each other, and the region of complementarity can replace the IND in the DMPK gene. For example, in some embodiments, the 3′ PEgRNA is part of a dual prime editing composition that further comprises a 5′ PEgRNA, wherein the 3′ PEgRNA comprises a RTT comprising a sequence selected from sequence numbers 3477-3479, and the 5′ PEgRNA comprises a spacer comprising nucleotides 5-20 of sequence number 484. In some embodiments, the 3′ PEgRNA is part of a dual prime editing composition that further comprises a 5′ PEgRNA, wherein the 3′ PEgRNA comprises a RTT comprising a sequence selected from sequence numbers 3480-3484, and the 5′ PEgRNA comprises a spacer comprising nucleotides 5-20 of sequence number 77. In some embodiments, the 3′ PEgRNA is part of a dual prime editing composition that further comprises a 5′ PEgRNA, wherein the 3′ PEgRNA comprises a RTT comprising a sequence selected from sequence numbers 3485-3489, and the 5′ PEgRNA comprises a spacer comprising nucleotides 5-20 of sequence number 590. In some embodiments, the 3′ PEgRNA is part of a dual prime editing composition that further comprises a 5′ PEgRNA, wherein the 3′ PEgRNA comprises a RTT comprising a sequence selected from sequence numbers 3490-3494, and the 5′ PEgRNA comprises a spacer comprising nucleotides 5-20 of sequence number 1019. In some embodiments, the 3′ PEgRNA is part of a dual prime editing composition that further comprises a 5′ PEgRNA, wherein the 3′ PEgRNA comprises a RTT comprising nucleotides x-40 of sequence number 3664, 3665, 3666, 3667, 3668, 3669, 3670, 3671, 3672, 3673, 3674, 3675, 3676, 3677, 3678, 3679, 3680, 3681, or 3682, wherein the 5′ PEgRNA comprises a spacer comprising nucleotides 5-20 of sequence number 518, 536, 554, 572, 590, 39, 912, 929, 947, 965, 983, 1001, 1019, 1341, 20, 77, 484, 58, or 1 respectively in the same order, and wherein x is any integer from 1 to 31. Each 3′ PEgRNA is assigned a RTT pairing number, which corresponds to a pairing 5′ spacer number in Table 40. The 3′ PEgRNA can be used in a dual prime editing system or composition with a 5′ PEgRNA comprising a spacer of the same pairing 5′ spacer number. Preferably, the 5′ PEgRNA comprises a “clean deletion” RTT, for example, an RTT selected from Table 39 that has a Pairing 3′ spacer number that is 1.

### Tables 21A and 21B

[0720] Tables 21A and 21B provide exemplary 3′ PEgRNAs and components that can be used with any prime editor containing a Cas9 protein capable of recognizing a NGG PAM sequence, wherein N is A, G, C, or T. The PEgRNAs exemplified in Tables 21A and 21B comprise: (a) a spacer comprising at its 3′ end a sequence corresponding to nucleotides 5-20 of sequence number 1381, (b) a gRNA core capable of binding to a Cas9 protein, and (c) an extension arm comprising (i) an editing template and (ii) a primer binding site (PBS) comprising at its 5′ end the sequence corresponding to sequence number 1396.

[0721] The PEgRNA spacer can be, for example, 16-22 nucleotides in length. In some embodiments, the PEgNA spacer is 16-20 nucleotides in length. In some embodiments, the PEgRNA spacer comprises nucleotides 5-20, 4-20, 3-20, 2-20, or 1-20 of sequence number 1381. In some embodiments, the PEgRNA spacer comprises the sequence of sequence number 1381. In some embodiments, the PEgRNA spacer is 20 nucleotides in length. Any of these spacers exemplified can be referred to as 3′ spacer No. 2.

[0722] The PBS can be, for example, 3 to 19 nucleotides in length. In some embodiments, the PBS is 3 to 17 nucleotides in length and corresponds to a PBS sequence in Table 20A. In some cases, a PBS length of no more than 3 nucleotides less than the PEgRNA spacer length is chosen.

[0723] The 3′ PEgRNAs of Tables 21A and 21B can be used in a dual prime editing system or composition further comprising any suitable 5′ PEgRNA. The prime editing system can be used, e.g., for editing a DMPK gene harboring 50 or more CTG repeats in the DMPK gene.

[0724] In some embodiments, a prime editing composition comprises a 3′ PEgRNA or component thereof exemplified in Tables 21A and 21B and a 5′ PEgRNA, wherein the editing template of the 3′ PEgRNA and the 5′ PEgRNA each comprises a region of complementarity to each other. For example, the editing template of the 3′ PEgRNA can comprise any of the RTT sequences provided in Table 38. The terms editing template and RTT may be used interchangeably. Each of the RTT sequences in Table 38 is assigned a RTT pairing number that reflects the complementarity relationship between a 5′ RTT and a 3′ RTT. The 3′ PEgRNA can be used in a dual prime editing system that further comprises a 5′ PEgRNA, e.g., a 5′ PEgRNA having a spacer sequence and a corresponding PBS as exemplified in Tables 1A-19B, wherein the 5′ PEgRNA comprises an editing template comprising a RTT sequence having a region of complementarity to the 3′ RTT. The 5′ RTT can comprise any of the RTT sequences provided in Table 37, wherein the 5′ RTT sequence has the same RTT Pairing number as that of the 3′ RTT. The editing template of the 5′ PEgRNA and the 3′ PEgRNA can be completely complementary to each other, wherein the 5′ editing template and the 3′ editing template have the same length and perfect complementarity to each other. Alternatively, the 5′ editing template can comprise a region of complementarity to the 3′ editing template, and further comprise a non-complementary region to the 3′ editing template. The 3′ editing template can comprise a region of complementarity to the 5′ editing template, and further comprise a non-complementary region to the 5′ editing template. The non-complementary region can be at the 5′ end or the 3′ end of the editing templates. Contacting the target DMPK gene with the prime editing system can result in deletion of the sequence between the 5′ PEgRNA nick and the 3′ PEgRNA nick (the IND) and insertion of the region of complementarity between the 5′ editing template and the 3′ editing template (the OD), or insertion of the region of complementarity between the 5′ editing template and the 3′ editing template as well as the non-complementarity regions (the RD), and hence replace the CTG expansion with the sequence of the OD or the RD. Each of the 3′ PEgRNA is assigned a RTT pairing number, and can be used in a dual prime editing composition with a 5′ PEgRNA comprising an RTT having the same RTT pairing number.

[0725] In some embodiments, a prime editing composition comprises a 3′ PEgRNA or component thereof exemplified in Tables 21A and 21B and a 5′ PEgRNA, wherein the editing template of the 3′ PEgRNA comprises a region of identity to the spacer of the 5′ PEgRNA. In some embodiments, the editing template of the 5′ PEgRNA comprises a region of identity to the spacer of the 3′ PEgRNA. In some embodiments, the 3′ editing template comprises a region of complementarity to a region on the first strand of the DMPK gene that is directly 3′ to nucleotide 3 of the search target sequence of the 5′ PEgRNA. In some embodiments, the 5′ editing template comprises a region of complementarity to a region on the second strand of the DMPK gene that is directly 3′ to nucleotide 3 (of the search target sequence of the 3′ PEgRNA. For example, the extension arm of the 3′ PEgRNA can comprise an editing template comprising the sequence of any of the RTT sequences provided in Table 40. Each of the RTT sequences in Table 40 is assigned a pairing 5′ spacer number. The 3′ PEgRNA can be used in a dual prime editing system with a 5′ PEgRNA, wherein the 5′ PEgRNA comprises a spacer that has the Pairing 5′ spacer number assigned to the 3′ RTT in Table 40. Contacting the target DMPK gene with the prime editing system can result in deletion of the sequence between the 5′ PEgRNA nick and the 3′ PEgRNA nick (the IND) without insertion of any exogenous sequence (a “clean deletion”). Alternatively, the 5′ editing template and the 3′ editing template can further comprise a region of complementarity to each other, and the region of complementarity can replace the IND in the DMPK gene. For example, in some embodiments, the 3′ PEgRNA is part of a dual prime editing composition that further comprises a 5′ PEgRNA, wherein the 3′ PEgRNA comprises a RTT comprising a sequence selected from sequence numbers 3477-3479, and the 5′ PEgRNA comprises a spacer comprising nucleotides 5-20 of sequence number 484. In some embodiments, the 3′ PEgRNA is part of a dual prime editing composition that further comprises a 5′ PEgRNA, wherein the 3′ PEgRNA comprises a RTT comprising a sequence selected from sequence numbers 3480-3484, and the 5′ PEgRNA comprises a spacer comprising nucleotides 5-20 of sequence number 77. In some embodiments, the 3′ PEgRNA is part of a dual prime editing composition that further comprises a 5′ PEgRNA, wherein the 3′ PEgRNA comprises a RTT comprising a sequence selected from sequence numbers 3485-3489, and the 5′ PEgRNA comprises a spacer comprising nucleotides 5-20 of sequence number 590. In some embodiments, the 3′ PEgRNA is part of a dual prime editing composition that further comprises a 5′ PEgRNA, wherein the 3′ PEgRNA comprises a RTT comprising a sequence selected from sequence numbers 3490-3494, and the 5′ PEgRNA comprises a spacer comprising nucleotides 5-20 of sequence number 1019. In some embodiments, the 3′ PEgRNA is part of a dual prime editing composition that further comprises a 5′ PEgRNA, wherein the 3′ PEgRNA comprises a RTT comprising nucleotides x-40 of sequence number 3664, 3665, 3666, 3667, 3668, 3669, 3670, 3671, 3672, 3673, 3674, 3675, 3676, 3677, 3678, 3679, 3680, 3681, or 3682, wherein the 5′ PEgRNA comprises a spacer comprising nucleotides 5-20 of sequence number 518, 536, 554, 572, 590, 39, 912, 929, 947, 965, 983, 1001, 1019, 1341, 20, 77, 484, 58, or 1 respectively in the same order, and wherein x is any integer from 1 to 31. Each 3′ PEgRNA is assigned a RTT pairing number, which corresponds to a pairing 5′ spacer number in Table 40. The 3′ PEgRNA can be used in a dual prime editing system or composition with a 5′ PEgRNA comprising a spacer of the same pairing 5′ spacer number. Preferably, the 5′ PEgRNA comprises a “clean deletion” RTT, for example, an RTT selected from Table 39 that has a Pairing 3′ spacer number that is 2.

### Tables 22A and 22B

[0726] Tables 22A and 22B provide exemplary 3′ PEgRNAs and components that can be used with any prime editor containing a Cas9 protein capable of recognizing a NGG PAM sequence, wherein N is A, G, C, or T. The PEgRNAs exemplified in Tables 22A and 22B comprise: (a) a spacer comprising at its 3′ end a sequence corresponding to nucleotides 5-20 of sequence number 1403, (b) a gRNA core capable of binding to a Cas9 protein, and (c) an extension arm comprising (i) an editing template and (ii) a primer binding site (PBS) comprising at its 5′ end the sequence corresponding to sequence number 1418.

[0727] The PEgRNA spacer can be, for example, 16-22 nucleotides in length. In some embodiments, the PEgNA spacer is 16-20 nucleotides in length. In some embodiments, the PEgRNA spacer comprises nucleotides 5-20, 4-20, 3-20, 2-20, or 1-20 of sequence number 1403. In some embodiments, the PEgRNA spacer comprises the sequence of sequence number 1403. In some embodiments, the PEgRNA spacer is 20 nucleotides in length. Any of these spacers exemplified can be referred to as 3′ spacer No. 3.

[0728] The PBS can be, for example, 3 to 19 nucleotides in length. In some embodiments, the PBS is 3 to 17 nucleotides in length and corresponds to a PBS sequence in Table 20A. In some cases, a PBS length of no more than 3 nucleotides less than the PEgRNA spacer length is chosen.

[0729] The 3′ PEgRNAs of Tables 22A and 22B can be used in a dual prime editing system or composition further comprising any suitable 5′ PEgRNA. The prime editing system can be used, e.g., for editing a DMPK gene harboring 50 or more CTG repeats in the DMPK gene.

[0730] In some embodiments, a prime editing composition comprises a 3′ PEgRNA or component thereof exemplified in Tables 22A and 22B and a 5′ PEgRNA, wherein the editing template of the 3′ PEgRNA and the 5′ PEgRNA each comprises a region of complementarity to each other. For example, the editing template of the 3′ PEgRNA can comprise any of the RTT sequences provided in Table 38. The terms editing template and RTT may be used interchangeably. Each of the RTT sequences in Table 38 is assigned a RTT pairing number that reflects the complementarity relationship between a 5′ RTT and a 3′ RTT. The 3′ PEgRNA can be used in a dual prime editing system that further comprises a 5′ PEgRNA, e.g., a 5′ PEgRNA having a spacer sequence and a corresponding PBS as exemplified in Tables 1A-19B, wherein the 5′ PEgRNA comprises an editing template comprising a RTT sequence having a region of complementarity to the 3′ RTT. The 5′ RTT can comprise any of the RTT sequences provided in Table 37, wherein the 5′ RTT sequence has the same RTT Pairing number as that of the 3′ RTT. The editing template of the 5′ PEgRNA and the 3′ PEgRNA can be completely complementary to each other, wherein the 5′ editing template and the 3′ editing template have the same length and perfect complementarity to each other. Alternatively, the 5′ editing template can comprise a region of complementarity to the 3′ editing template, and further comprise a non-complementary region to the 3′ editing template. The 3′ editing template can comprise a region of complementarity to the 5′ editing template, and further comprise a non-complementary region to the 5′ editing template. The non-complementary region can be at the 5′ end or the 3′ end of the editing templates. Contacting the target DMPK gene with the prime editing system can result in deletion of the sequence between the 5′ PEgRNA nick and the 3′ PEgRNA nick (the IND) and insertion of the region of complementarity between the 5′ editing template and the 3′ editing template (the OD), or insertion of the region of complementarity between the 5′ editing template and the 3′ editing template as well as the non-complementarity regions (the RD), and hence replace the CTG expansion with the sequence of the OD or the RD. Each of the 3′ PEgRNA is assigned a RTT pairing number, and can be used in a dual prime editing composition with a 5′ PEgRNA comprising an RTT having the same RTT pairing number.

[0731] In some embodiments, a prime editing composition comprises a 3′ PEgRNA or component thereof exemplified in Tables 22A and 22B and a 5′ PEgRNA, wherein the editing template of the 3′ PEgRNA comprises a region of identity to the spacer of the 5′ PEgRNA. In some embodiments, the editing template of the 5′ PEgRNA comprises a region of identity to the spacer of the 3′ PEgRNA. In some embodiments, the 3′ editing template comprises a region of complementarity to a region on the first strand of the DMPK gene that is directly 3′ to nucleotide 3 of the search target sequence of the 5′ PEgRNA. In some embodiments, the 5′ editing template comprises a region of complementarity to a region on the second strand of the DMPK gene that is directly 3′ to nucleotide 3 of the search target sequence of the 3′ PEgRNA. For example, the extension arm of the 3′ PEgRNA can comprise an editing template comprising the sequence of any of the RTT sequences provided in Table 40. Each of the RTT sequences in Table 40 is assigned a pairing 5′ spacer number. The 3′ PEgRNA can be used in a dual prime editing system with a 5′ PEgRNA, wherein the 5′ PEgRNA comprises a spacer that has the Pairing 5′ spacer number assigned to the 3′ RTT in Table 40. Contacting the target DMPK gene with the prime editing system can result in deletion of the sequence between the 5′ PEgRNA nick and the 3′ PEgRNA nick (the IND) without insertion of any exogenous sequence (a “clean deletion”). Alternatively, the 5′ editing template and the 3′ editing template can further comprise a region of complementarity to each other, and the region of complementarity can replace the IND in the DMPK gene. For example, in some embodiments, the 3′ PEgRNA is part of a dual prime editing composition that further comprises a 5′ PEgRNA, wherein the 3′ PEgRNA comprises a RTT comprising a sequence selected from sequence numbers 3477-3479, and the 5′ PEgRNA comprises a spacer comprising nucleotides 5-20 of sequence number 484. In some embodiments, the 3′ PEgRNA is part of a dual prime editing composition that further comprises a 5′ PEgRNA, wherein the 3′ PEgRNA comprises a RTT comprising a sequence selected from sequence numbers 3480-3484, and the 5′ PEgRNA comprises a spacer comprising nucleotides 5-20 of sequence number 77. In some embodiments, the 3′ PEgRNA is part of a dual prime editing composition that further comprises a 5′ PEgRNA, wherein the 3′ PEgRNA comprises a RTT comprising a sequence selected from sequence numbers 3485-3489, and the 5′ PEgRNA comprises a spacer comprising nucleotides 5-20 of sequence number 590. In some embodiments, the 3′ PEgRNA is part of a dual prime editing composition that further comprises a 5′ PEgRNA, wherein the 3′ PEgRNA comprises a RTT comprising a sequence selected from sequence numbers 3490-3494, and the 5′ PEgRNA comprises a spacer comprising nucleotides 5-20 of sequence number 1019. In some embodiments, the 3′ PEgRNA is part of a dual prime editing composition that further comprises a 5′ PEgRNA, wherein the 3′ PEgRNA comprises a RTT comprising nucleotides x-40 of sequence number 3664, 3665, 3666, 3667, 3668, 3669, 3670, 3671, 3672, 3673, 3674, 3675, 3676, 3677, 3678, 3679, 3680, 3681, or 3682, wherein the 5′ PEgRNA comprises a spacer comprising nucleotides 5-20 of sequence number 518, 536, 554, 572, 590, 39, 912, 929, 947, 965, 983, 1001, 1019, 1341, 20, 77, 484, 58, or 1 respectively in the same order, and wherein x is any integer from 1 to 31. Each 3′ PEgRNA is assigned a RTT pairing number, which corresponds to a pairing 5′ spacer number in Table 40. The 3′ PEgRNA can be used in a dual prime editing system or composition with a 5′ PEgRNA comprising a spacer of the same pairing 5′ spacer number. Preferably, the 5′ PEgRNA comprises a “clean deletion” RTT, for example, an RTT selected from Table 39 that has a Pairing 3′ spacer number that is 3.

### Tables 23A and 23B

[0732] Tables 23A and 23B provide exemplary 3′ PEgRNAs and components that can be used with any prime editor containing a Cas9 protein capable of recognizing a NGG PAM sequence, wherein N is A, G, C, or T. The PEgRNAs exemplified in Tables 23A and 23B comprise: (a) a spacer comprising at its 3′ end a sequence corresponding to nucleotides 5-20 of sequence number 1503, (b) a gRNA core capable of binding to a Cas9 protein, and (c) an extension arm comprising (i) an editing template and (ii) a primer binding site (PBS) comprising at its 5′ end the sequence corresponding to sequence number 1518.

[0733] The PEgRNA spacer can be, for example, 16-22 nucleotides in length. In some embodiments, the PEgNA spacer is 16-20 nucleotides in length. In some embodiments, the PEgRNA spacer comprises nucleotides 5-20, 4-20, 3-20, 2-20, or 1-20 of sequence number 1503. In some embodiments, the PEgRNA spacer comprises the sequence of sequence number 1503. In some embodiments, the PEgRNA spacer is 20 nucleotides in length. Any of these spacers exemplified can be referred to as 3′ spacer No. 4.

[0734] The PBS can be, for example, 3 to 19 nucleotides in length. In some embodiments, the PBS is 3 to 17 nucleotides in length and corresponds to a PBS sequence in Table 20A. In some cases, a PBS length of no more than 3 nucleotides less than the PEgRNA spacer length is chosen.

[0735] The 3′ PEgRNAs of Tables 23A and 23B can be used in a dual prime editing system or composition further comprising any suitable 5′ PEgRNA. The prime editing system can be used, e.g., for editing a DMPK gene harboring 50 or more CTG repeats in the DMPK gene.

[0736] In some embodiments, a prime editing composition comprises a 3′ PEgRNA or component thereof exemplified in Tables 23A and 23B and a 5′ PEgRNA, wherein the editing template of the 3′ PEgRNA and the 5′ PEgRNA each comprises a region of complementarity to each other. For example, the editing template of the 3′ PEgRNA can comprise any of the RTT sequences provided in Table 38. The terms editing template and RTT may be used interchangeably. Each of the RTT sequences in Table 38 is assigned a RTT pairing number that reflects the complementarity relationship between a 5′ RTT and a 3′ RTT. The 3′ PEgRNA can be used in a dual prime editing system that further comprises a 5′ PEgRNA, e.g., a 5′ PEgRNA having a spacer sequence and a corresponding PBS as exemplified in Tables 1A-19B, wherein the 5′ PEgRNA comprises an editing template comprising a RTT sequence having a region of complementarity to the 3′ RTT. The 5′ RTT can comprise any of the RTT sequences provided in Table 37, wherein the 5′ RTT sequence has the same RTT Pairing number as that of the 3′ RTT. The editing template of the 5′ PEgRNA and the 3′ PEgRNA can be completely complementary to each other, wherein the 5′ editing template and the 3′ editing template have the same length and perfect complementarity to each other. Alternatively, the 5′ editing template can comprise a region of complementarity to the 3′ editing template, and further comprise a non-complementary region to the 3′ editing template. The 3′ editing template can comprise a region of complementarity to the 5′ editing template, and further comprise a non-complementary region to the 5′ editing template. The non-complementary region can be at the 5′ end or the 3′ end of the editing templates. Contacting the target DMPK gene with the prime editing system can result in deletion of the sequence between the 5′ PEgRNA nick and the 3′ PEgRNA nick (the IND) and insertion of the region of complementarity between the 5′ editing template and the 3′ editing template (the OD), or insertion of the region of complementarity between the 5′ editing template and the 3′ editing template as well as the non-complementarity regions (the RD), and hence replace the CTG expansion with the sequence of the OD or the RD. Each of the 3′ PEgRNA is assigned a RTT pairing number, and can be used in a dual prime editing composition with a 5′ PEgRNA comprising an RTT having the same RTT pairing number.

[0737] In some embodiments, a prime editing composition comprises a 3′ PEgRNA or component thereof exemplified in Tables 23A and 23B and a 5′ PEgRNA, wherein the editing template of the 3′ PEgRNA comprises a region of identity to the spacer of the 5′ PEgRNA. In some embodiments, the editing template of the 5′ PEgRNA comprises a region of identity to the spacer of the 3′ PEgRNA. In some embodiments, the 3′ editing template comprises a region of complementarity to a region on the first strand of the DMPK gene that is directly 3′ to nucleotide 3 of the search target sequence of the 5′ PEgRNA. In some embodiments, the 5′ editing template comprises a region of complementarity to a region on the second strand of the DMPK gene that is directly 3′ to nucleotide 3 of the search target sequence of the 3′ PEgRNA. For example, the extension arm of the 3′ PEgRNA can comprise an editing template comprising the sequence of any of the RTT sequences provided in Table 40. Each of the RTT sequences in Table 40 is assigned a pairing 5′ spacer number. The 3′ PEgRNA can be used in a dual prime editing system with a 5′ PEgRNA, wherein the 5′ PEgRNA comprises a spacer that has the Pairing 5′ spacer number assigned to the 3′ RTT in Table 40. Contacting the target DMPK gene with the prime editing system can result in deletion of the sequence between the 5′ PEgRNA nick and the 3′ PEgRNA nick (the IND) without insertion of any exogenous sequence (a “clean deletion”). Alternatively, the 5′ editing template and the 3′ editing template can further comprise a region of complementarity to each other, and the region of complementarity can replace the IND in the DMPK gene. For example, in some embodiments, the 3′ PEgRNA is part of a dual prime editing composition that further comprises a 5′ PEgRNA, wherein the 3′ PEgRNA comprises a RTT comprising a sequence selected from sequence numbers 3477-3479, and the 5′ PEgRNA comprises a spacer comprising nucleotides 5-20 of sequence number 484. In some embodiments, the 3′ PEgRNA is part of a dual prime editing composition that further comprises a 5′ PEgRNA, wherein the 3′ PEgRNA comprises a RTT comprising a sequence selected from sequence numbers 3480-3484, and the 5′ PEgRNA comprises a spacer comprising nucleotides 5-20 of sequence number 77. In some embodiments, the 3′ PEgRNA is part of a dual prime editing composition that further comprises a 5′ PEgRNA, wherein the 3′ PEgRNA comprises a RTT comprising a sequence selected from sequence numbers 3485-3489, and the 5′ PEgRNA comprises a spacer comprising nucleotides 5-20 of sequence number 590. In some embodiments, the 3′ PEgRNA is part of a dual prime editing composition that further comprises a 5′ PEgRNA, wherein the 3′ PEgRNA comprises a RTT comprising a sequence selected from sequence numbers 3490-3494, and the 5′ PEgRNA comprises a spacer comprising nucleotides 5-20 of sequence number 1019. In some embodiments, the 3′ PEgRNA is part of a dual prime editing composition that further comprises a 5′ PEgRNA, wherein the 3′ PEgRNA comprises a RTT comprising nucleotides x-40 of sequence number 3664, 3665, 3666, 3667, 3668, 3669, 3670, 3671, 3672, 3673, 3674, 3675, 3676, 3677, 3678, 3679, 3680, 3681, or 3682, wherein the 5′ PEgRNA comprises a spacer comprising nucleotides 5-20 of sequence number 518, 536, 554, 572, 590, 39, 912, 929, 947, 965, 983, 1001, 1019, 1341, 20, 77, 484, 58, or 1 respectively in the same order, and wherein x is any integer from 1 to 31. Each 3′ PEgRNA is assigned a RTT pairing number, which corresponds to a pairing 5′ spacer number in Table 40. The 3′ PEgRNA can be used in a dual prime editing system or composition with a 5′ PEgRNA comprising a spacer of the same pairing 5′ spacer number. Preferably, the 5′ PEgRNA comprises a “clean deletion” RTT, for example, an RTT selected from Table 39 that has a Pairing 3′ spacer number that is 4.

### Tables 24A and 24B

[0738] Tables 24A and 24B provide exemplary 3′ PEgRNAs and components that can be used with any prime editor containing a Cas9 protein capable of recognizing a NGG PAM sequence, wherein N is A, G, C, or T. The PEgRNAs exemplified in Tables 24A and 24B comprise: (a) a spacer comprising at its 3′ end a sequence corresponding to nucleotides 5-20 of sequence number 1525, (b) a gRNA core capable of binding to a Cas9 protein, and (c) an extension arm comprising (i) an editing template and (ii) a primer binding site (PBS) comprising at its 5′ end the sequence corresponding to sequence number 1540.

[0739] The PEgRNA spacer can be, for example, 16-22 nucleotides in length. In some embodiments, the PEgNA spacer is 16-20 nucleotides in length. In some embodiments, the PEgRNA spacer comprises nucleotides 5-20, 4-20, 3-20, 2-20, or 1-20 of sequence number 1525. In some embodiments, the PEgRNA spacer comprises the sequence of sequence number 1525. In some embodiments, the PEgRNA spacer is 20 nucleotides in length. Any of these spacers exemplified can be referred to as 3′ spacer No. 5.

[0740] The PBS can be, for example, 3 to 19 nucleotides in length. In some embodiments, the PBS is 3 to 17 nucleotides in length and corresponds to a PBS sequence in Table 20A. In some cases, a PBS length of no more than 3 nucleotides less than the PEgRNA spacer length is chosen.

[0741] The 3′ PEgRNAs of Tables 24A and 24B can be used in a dual prime editing system or composition further comprising any suitable 5′ PEgRNA. The prime editing system can be used, e.g., for editing a DMPK gene harboring 50 or more CTG repeats in the DMPK gene.

[0742] In some embodiments, a prime editing composition comprises a 3′ PEgRNA or component thereof exemplified in Tables 24A and 24B and a 5′ PEgRNA, wherein the editing template of the 3′ PEgRNA and the 5′ PEgRNA each comprises a region of complementarity to each other. For example, the editing template of the 3′ PEgRNA can comprise any of the RTT sequences provided in Table 38. The terms editing template and RTT may be used interchangeably. Each of the RTT sequences in Table 38 is assigned a RTT pairing number that reflects the complementarity relationship between a 5′ RTT and a 3′ RTT. The 3′ PEgRNA can be used in a dual prime editing system that further comprises a 5′ PEgRNA, e.g., a 5′ PEgRNA having a spacer sequence and a corresponding PBS as exemplified in Tables 1A-19B, wherein the 5′ PEgRNA comprises an editing template comprising a RTT sequence having a region of complementarity to the 3′ RTT. The 5′ RTT can comprise any of the RTT sequences provided in Table 37, wherein the 5′ RTT sequence has the same RTT Pairing number as that of the 3′ RTT. The editing template of the 5′ PEgRNA and the 3′ PEgRNA can be completely complementary to each other, wherein the 5′ editing template and the 3′ editing template have the same length and perfect complementarity to each other. Alternatively, the 5′ editing template can comprise a region of complementarity to the 3′ editing template, and further comprise a non-complementary region to the 3′ editing template. The 3′ editing template can comprise a region of complementarity to the 5′ editing template, and further comprise a non-complementary region to the 5′ editing template. The non-complementary region can be at the 5′ end or the 3′ end of the editing templates. Contacting the target DMPK gene with the prime editing system can result in deletion of the sequence between the 5′ PEgRNA nick and the 3′ PEgRNA nick (the IND) and insertion of the region of complementarity between the 5′ editing template and the 3′ editing template (the OD), or insertion of the region of complementarity between the 5′ editing template and the 3′ editing template as well as the non-complementarity regions (the RD), and hence replace the CTG expansion with the sequence of the OD or the RD. Each of the 3′ PEgRNA is assigned a RTT pairing number, and can be used in a dual prime editing composition with a 5′ PEgRNA comprising an RTT having the same RTT pairing number.

[0743] In some embodiments, a prime editing composition comprises a 3′ PEgRNA or component thereof exemplified in Tables 24A and 24B and a 5′ PEgRNA, wherein the editing template of the 3′ PEgRNA comprises a region of identity to the spacer of the 5′ PEgRNA. In some embodiments, the editing template of the 5′ PEgRNA comprises a region of identity to the spacer of the 3′ PEgRNA. In some embodiments, the 3′ editing template comprises a region of complementarity to a region on the first strand of the DMPK gene that is directly 3′ to nucleotide 3 of the search target sequence of the 5′ PEgRNA. In some embodiments, the 5′ editing template comprises a region of complementarity to a region on the second strand of the DMPK gene that is directly 3′ to nucleotide 3 of the search target sequence of the 3′ PEgRNA. For example, the extension arm of the 3′ PEgRNA can comprise an editing template comprising the sequence of any of the RTT sequences provided in Table 40. Each of the RTT sequences in Table 40 is assigned a pairing 5′ spacer number. The 3′ PEgRNA can be used in a dual prime editing system with a 5′ PEgRNA, wherein the 5′ PEgRNA comprises a spacer that has the Pairing 5′ spacer number assigned to the 3′ RTT in Table 40. Contacting the target DMPK gene with the prime editing system can result in deletion of the sequence between the 5′ PEgRNA nick and the 3′ PEgRNA nick (the IND) without insertion of any exogenous sequence (a “clean deletion”). Alternatively, the 5′ editing template and the 3′ editing template can further comprise a region of complementarity to each other, and the region of complementarity can replace the IND in the DMPK gene. For example, in some embodiments, the 3′ PEgRNA is part of a dual prime editing composition that further comprises a 5′ PEgRNA, wherein the 3′ PEgRNA comprises a RTT comprising a sequence selected from sequence numbers 3477-3479, and the 5′ PEgRNA comprises a spacer comprising nucleotides 5-20 of sequence number 484. In some embodiments, the 3′ PEgRNA is part of a dual prime editing composition that further comprises a 5′ PEgRNA, wherein the 3′ PEgRNA comprises a RTT comprising a sequence selected from sequence numbers 3480-3484, and the 5′ PEgRNA comprises a spacer comprising nucleotides 5-20 of sequence number 77. In some embodiments, the 3′ PEgRNA is part of a dual prime editing composition that further comprises a 5′ PEgRNA, wherein the 3′ PEgRNA comprises a RTT comprising a sequence selected from sequence numbers 3485-3489, and the 5′ PEgRNA comprises a spacer comprising nucleotides 5-20 of sequence number 590. In some embodiments, the 3′ PEgRNA is part of a dual prime editing composition that further comprises a 5′ PEgRNA, wherein the 3′ PEgRNA comprises a RTT comprising a sequence selected from sequence numbers 3490-3494, and the 5′ PEgRNA comprises a spacer comprising nucleotides 5-20 of sequence number 1019. In some embodiments, the 3′ PEgRNA is part of a dual prime editing composition that further comprises a 5′ PEgRNA, wherein the 3′ PEgRNA comprises a RTT comprising nucleotides x-40 of sequence number 3664, 3665, 3666, 3667, 3668, 3669, 3670, 3671, 3672, 3673, 3674, 3675, 3676, 3677, 3678, 3679, 3680, 3681, or 3682, wherein the 5′ PEgRNA comprises a spacer comprising nucleotides 5-20 of sequence number 518, 536, 554, 572, 590, 39, 912, 929, 947, 965, 983, 1001, 1019, 1341, 20, 77, 484, 58, or 1 respectively in the same order, and wherein x is any integer from 1 to 31. Each 3′ PEgRNA is assigned a RTT pairing number, which corresponds to a pairing 5′ spacer number in Table 40. The 3′ PEgRNA can be used in a dual prime editing system or composition with a 5′ PEgRNA comprising a spacer of the same pairing 5′ spacer number. Preferably, the 5′ PEgRNA comprises a “clean deletion” RTT, for example, an RTT selected from Table 39 that has a Pairing 3′ spacer number that is 5.

### Tables 25A and 25B

[0744] Tables 25A and 25B provide exemplary 3′ PEgRNAs and components that can be used with any prime editor containing a Cas9 protein capable of recognizing a NGG PAM sequence, wherein N is A, G, C, or T. The PEgRNAs exemplified in Tables 25A and 25B comprise: (a) a spacer comprising at its 3′ end a sequence corresponding to nucleotides 5-20 of sequence number 1864, (b) a gRNA core capable of binding to a Cas9 protein, and (c) an extension arm comprising (i) an editing template and (ii) a primer binding site (PBS) comprising at its 5′ end the sequence corresponding to sequence number 1879.

[0745] The PEgRNA spacer can be, for example, 16-22 nucleotides in length. In some embodiments, the PEgNA spacer is 16-20 nucleotides in length. In some embodiments, the PEgRNA spacer comprises nucleotides 5-20, 4-20, 3-20, 2-20, or 1-20 of sequence number 1864. In some embodiments, the PEgRNA spacer comprises the sequence of sequence number 1864. In some embodiments, the PEgRNA spacer is 20 nucleotides in length. Any of these spacers exemplified can be referred to as 3′ spacer No. 6.

[0746] The PBS can be, for example, 3 to 19 nucleotides in length. In some embodiments, the PBS is 3 to 17 nucleotides in length and corresponds to a PBS sequence in Table 20A. In some cases, a PBS length of no more than 3 nucleotides less than the PEgRNA spacer length is chosen.

[0747] The 3′ PEgRNAs of Tables 25A and 25B can be used in a dual prime editing system or composition further comprising any suitable 5′ PEgRNA. The prime editing system can be used, e.g., for editing a DMPK gene harboring 50 or more CTG repeats in the DMPK gene.

[0748] In some embodiments, a prime editing composition comprises a 3′ PEgRNA or component thereof exemplified in Tables 25A and 25B and a 5′ PEgRNA, wherein the editing template of the 3′ PEgRNA and the 5′ PEgRNA each comprises a region of complementarity to each other. For example, the editing template of the 3′ PEgRNA can comprise any of the RTT sequences provided in Table 38. The terms editing template and RTT may be used interchangeably. Each of the RTT sequences in Table 38 is assigned a RTT pairing number that reflects the complementarity relationship between a 5′ RTT and a 3′ RTT. The 3′ PEgRNA can be used in a dual prime editing system that further comprises a 5′ PEgRNA, e.g., a 5′ PEgRNA having a spacer sequence and a corresponding PBS as exemplified in Tables 1A-19B, wherein the 5′ PEgRNA comprises an editing template comprising a RTT sequence having a region of complementarity to the 3′ RTT. The 5′ RTT can comprise any of the RTT sequences provided in Table 37, wherein the 5′ RTT sequence has the same RTT Pairing number as that of the 3′ RTT. The editing template of the 5′ PEgRNA and the 3′ PEgRNA can be completely complementary to each other, wherein the 5′ editing template and the 3′ editing template have the same length and perfect complementarity to each other. Alternatively, the 5′ editing template can comprise a region of complementarity to the 3′ editing template, and further comprise a non-complementary region to the 3′ editing template. The 3′ editing template can comprise a region of complementarity to the 5′ editing template, and further comprise a non-complementary region to the 5′ editing template. The non-complementary region can be at the 5′ end or the 3′ end of the editing templates. Contacting the target DMPK gene with the prime editing system can result in deletion of the sequence between the 5′ PEgRNA nick and the 3′ PEgRNA nick (the IND) and insertion of the region of complementarity between the 5′ editing template and the 3′ editing template (the OD), or insertion of the region of complementarity between the 5′ editing template and the 3′ editing template as well as the non-complementarity regions (the RD), and hence replace the CTG expansion with the sequence of the OD or the RD. Each of the 3′ PEgRNA is assigned a RTT pairing number, and can be used in a dual prime editing composition with a 5′ PEgRNA comprising an RTT having the same RTT pairing number.

[0749] In some embodiments, a prime editing composition comprises a 3′ PEgRNA or component thereof exemplified in Tables 25A and 25B and a 5′ PEgRNA, wherein the editing template of the 3′ PEgRNA comprises a region of identity to the spacer of the 5′ PEgRNA. In some embodiments, the editing template of the 5′ PEgRNA comprises a region of identity to the spacer of the 3′ PEgRNA. In some embodiments, the 3′ editing template comprises a region of complementarity to a region on the first strand of the DMPK gene that is directly 3′ to nucleotide 3 of the search target sequence of the 5′ PEgRNA. In some embodiments, the 5′ editing template comprises a region of complementarity to a region on the second strand of the DMPK gene that is directly 3′ to nucleotide 3 of the search target sequence of the 3′ PEgRNA. For example, the extension arm of the 3′ PEgRNA can comprise an editing template comprising the sequence of any of the RTT sequences provided in Table 40. Each of the RTT sequences in Table 40 is assigned a pairing 5′ spacer number. The 3′ PEgRNA can be used in a dual prime editing system with a 5′ PEgRNA, wherein the 5′ PEgRNA comprises a spacer that has the Pairing 5′ spacer number assigned to the 3′ RTT in Table 40. Contacting the target DMPK gene with the prime editing system can result in deletion of the sequence between the 5′ PEgRNA nick and the 3′ PEgRNA nick (the IND) without insertion of any exogenous sequence (a “clean deletion”). Alternatively, the 5′ editing template and the 3′ editing template can further comprise a region of complementarity to each other, and the region of complementarity can replace the IND in the DMPK gene. For example, in some embodiments, the 3′ PEgRNA is part of a dual prime editing composition that further comprises a 5′ PEgRNA, wherein the 3′ PEgRNA comprises a RTT comprising a sequence selected from sequence numbers 3477-3479, and the 5′ PEgRNA comprises a spacer comprising nucleotides 5-20 of sequence number 484. In some embodiments, the 3′ PEgRNA is part of a dual prime editing composition that further comprises a 5′ PEgRNA, wherein the 3′ PEgRNA comprises a RTT comprising a sequence selected from sequence numbers 3480-3484, and the 5′ PEgRNA comprises a spacer comprising nucleotides 5-20 of sequence number 77. In some embodiments, the 3′ PEgRNA is part of a dual prime editing composition that further comprises a 5′ PEgRNA, wherein the 3′ PEgRNA comprises a RTT comprising a sequence selected from sequence numbers 3485-3489, and the 5′ PEgRNA comprises a spacer comprising nucleotides 5-20 of sequence number 590. In some embodiments, the 3′ PEgRNA is part of a dual prime editing composition that further comprises a 5′ PEgRNA, wherein the 3′ PEgRNA comprises a RTT comprising a sequence selected from sequence numbers 3490-3494, and the 5′ PEgRNA comprises a spacer comprising nucleotides 5-20 of sequence number 1019. In some embodiments, the 3′ PEgRNA is part of a dual prime editing composition that further comprises a 5′ PEgRNA, wherein the 3′ PEgRNA comprises a RTT comprising nucleotides x-40 of sequence number 3664, 3665, 3666, 3667, 3668, 3669, 3670, 3671, 3672, 3673, 3674, 3675, 3676, 3677, 3678, 3679, 3680, 3681, or 3682, wherein the 5′ PEgRNA comprises a spacer comprising nucleotides 5-20 of sequence number 518, 536, 554, 572, 590, 39, 912, 929, 947, 965, 983, 1001, 1019, 1341, 20, 77, 484, 58, or 1 respectively in the same order, and wherein x is any integer from 1 to 31. Each 3′ PEgRNA is assigned a RTT pairing number, which corresponds to a pairing 5′ spacer number in Table 40. The 3′ PEgRNA can be used in a dual prime editing system or composition with a 5′ PEgRNA comprising a spacer of the same pairing 5′ spacer number. Preferably, the 5′ PEgRNA comprises a “clean deletion” RTT, for example, an RTT selected from Table 39 that has a Pairing 3′ spacer number that is 6.

### Tables 26A and 26B

[0750] Tables 26A and 26B provide exemplary 3′ PEgRNAs and components that can be used with any prime editor containing a Cas9 protein capable of recognizing a NGG PAM sequence, wherein N is A, G, C, or T. The PEgRNAs exemplified in Tables 26A and 26B comprise: (a) a spacer comprising at its 3′ end a sequence corresponding to nucleotides 5-20 of sequence number 1882, (b) a gRNA core capable of binding to a Cas9 protein, and (c) an extension arm comprising (i) an editing template and (ii) a primer binding site (PBS) comprising at its 5′ end the sequence corresponding to sequence number 1897.

[0751] The PEgRNA spacer can be, for example, 16-22 nucleotides in length. In some embodiments, the PEgNA spacer is 16-20 nucleotides in length. In some embodiments, the PEgRNA spacer comprises nucleotides 5-20, 4-20, 3-20, 2-20, or 1-20 of sequence number 1882. In some embodiments, the PEgRNA spacer comprises the sequence of sequence number 1882. In some embodiments, the PEgRNA spacer is 20 nucleotides in length. Any of these spacers exemplified can be referred to as 3′ spacer No. 7.

[0752] The PBS can be, for example, 3 to 19 nucleotides in length. In some embodiments, the PBS is 3 to 17 nucleotides in length and corresponds to a PBS sequence in Table 20A. In some cases, a PBS length of no more than 3 nucleotides less than the PEgRNA spacer length is chosen.

[0753] The 3′ PEgRNAs of Tables 26A and 26B can be used in a dual prime editing system or composition further comprising any suitable 5′ PEgRNA. The prime editing system can be used, e.g., for editing a DMPK gene harboring 50 or more CTG repeats in the DMPK gene.

[0754] In some embodiments, a prime editing composition comprises a 3′ PEgRNA or component thereof exemplified in Tables 26A and 26B and a 5′ PEgRNA, wherein the editing template of the 3′ PEgRNA and the 5′ PEgRNA each comprises a region of complementarity to each other. For example, the editing template of the 3′ PEgRNA can comprise any of the RTT sequences provided in Table 38. The terms editing template and RTT may be used interchangeably. Each of the RTT sequences in Table 38 is assigned a RTT pairing number that reflects the complementarity relationship between a 5′ RTT and a 3′ RTT. The 3′ PEgRNA can be used in a dual prime editing system that further comprises a 5′ PEgRNA, e.g., a 5′ PEgRNA having a spacer sequence and a corresponding PBS as exemplified in Tables 1A-19B, wherein the 5′ PEgRNA comprises an editing template comprising a RTT sequence having a region of complementarity to the 3′ RTT. The 5′ RTT can comprise any of the RTT sequences provided in Table 37, wherein the 5′ RTT sequence has the same RTT Pairing number as that of the 3′ RTT. The editing template of the 5′ PEgRNA and the 3′ PEgRNA can be completely complementary to each other, wherein the 5′ editing template and the 3′ editing template have the same length and perfect complementarity to each other. Alternatively, the 5′ editing template can comprise a region of complementarity to the 3′ editing template, and further comprise a non-complementary region to the 3′ editing template. The 3′ editing template can comprise a region of complementarity to the 5′ editing template, and further comprise a non-complementary region to the 5′ editing template. The non-complementary region can be at the 5′ end or the 3′ end of the editing templates. Contacting the target DMPK gene with the prime editing system can result in deletion of the sequence between the 5′ PEgRNA nick and the 3′ PEgRNA nick (the IND) and insertion of the region of complementarity between the 5′ editing template and the 3′ editing template (the OD), or insertion of the region of complementarity between the 5′ editing template and the 3′ editing template as well as the non-complementarity regions (the RD), and hence replace the CTG expansion with the sequence of the OD or the RD. Each of the 3′ PEgRNA is assigned a RTT pairing number, and can be used in a dual prime editing composition with a 5′ PEgRNA comprising an RTT having the same RTT pairing number.

[0755] In some embodiments, a prime editing composition comprises a 3′ PEgRNA or component thereof exemplified in Tables 26A and 26B and a 5′ PEgRNA, wherein the editing template of the 3′ PEgRNA comprises a region of identity to the spacer of the 5′ PEgRNA. In some embodiments, the editing template of the 5′ PEgRNA comprises a region of identity to the spacer of the 3′ PEgRNA. In some embodiments, the 3′ editing template comprises a region of complementarity to a region on the first strand of the DMPK gene that is directly 3′ to nucleotide 3 of the search target sequence of the 5′ PEgRNA. In some embodiments, the 5′ editing template comprises a region of complementarity to a region on the second strand of the DMPK gene that is directly 3′ to nucleotide 3 of the search target sequence of the 3′ PEgRNA. For example, the extension arm of the 3′ PEgRNA can comprise an editing template comprising the sequence of any of the RTT sequences provided in Table 40. Each of the RTT sequences in Table 40 is assigned a pairing 5′ spacer number. The 3′ PEgRNA can be used in a dual prime editing system with a 5′ PEgRNA, wherein the 5′ PEgRNA comprises a spacer that has the Pairing 5′ spacer number assigned to the 3′ RTT in Table 40. Contacting the target DMPK gene with the prime editing system can result in deletion of the sequence between the 5′ PEgRNA nick and the 3′ PEgRNA nick (the IND) without insertion of any exogenous sequence (a “clean deletion”). Alternatively, the 5′ editing template and the 3′ editing template can further comprise a region of complementarity to each other, and the region of complementarity can replace the IND in the DMPK gene. For example, in some embodiments, the 3′ PEgRNA is part of a dual prime editing composition that further comprises a 5′ PEgRNA, wherein the 3′ PEgRNA comprises a RTT comprising a sequence selected from sequence numbers 3477-3479, and the 5′ PEgRNA comprises a spacer comprising nucleotides 5-20 of sequence number 484. In some embodiments, the 3′ PEgRNA is part of a dual prime editing composition that further comprises a 5′ PEgRNA, wherein the 3′ PEgRNA comprises a RTT comprising a sequence selected from sequence numbers 3480-3484, and the 5′ PEgRNA comprises a spacer comprising nucleotides 5-20 of sequence number 77. In some embodiments, the 3′ PEgRNA is part of a dual prime editing composition that further comprises a 5′ PEgRNA, wherein the 3′ PEgRNA comprises a RTT comprising a sequence selected from sequence numbers 3485-3489, and the 5′ PEgRNA comprises a spacer comprising nucleotides 5-20 of sequence number 590. In some embodiments, the 3′ PEgRNA is part of a dual prime editing composition that further comprises a 5′ PEgRNA, wherein the 3′ PEgRNA comprises a RTT comprising a sequence selected from sequence numbers 3490-3494, and the 5′ PEgRNA comprises a spacer comprising nucleotides 5-20 of sequence number 1019. In some embodiments, the 3′ PEgRNA is part of a dual prime editing composition that further comprises a 5′ PEgRNA, wherein the 3′ PEgRNA comprises a RTT comprising nucleotides x-40 of sequence number 3664, 3665, 3666, 3667, 3668, 3669, 3670, 3671, 3672, 3673, 3674, 3675, 3676, 3677, 3678, 3679, 3680, 3681, or 3682, wherein the 5′ PEgRNA comprises a spacer comprising nucleotides 5-20 of sequence number 518, 536, 554, 572, 590, 39, 912, 929, 947, 965, 983, 1001, 1019, 1341, 20, 77, 484, 58, or 1 respectively in the same order, and wherein x is any integer from 1 to 31. Each 3′ PEgRNA is assigned a RTT pairing number, which corresponds to a pairing 5′ spacer number in Table 40. The 3′ PEgRNA can be used in a dual prime editing system or composition with a 5′ PEgRNA comprising a spacer of the same pairing 5′ spacer number. Preferably, the 5′ PEgRNA comprises a “clean deletion” RTT, for example, an RTT selected from Table 39 that has a Pairing 3′ spacer number that is 7.

### Tables 28A and 28B

[0756] Tables 28A and 28B provide exemplary 3′ PEgRNAs and components that can be used with any prime editor containing a Cas9 protein capable of recognizing a NGG PAM sequence, wherein N is A, G, C, or T. The PEgRNAs exemplified in Tables 28A and 28B comprise: (a) a spacer comprising at its 3′ end a sequence corresponding to nucleotides 5-20 of sequence number 1918, (b) a gRNA core capable of binding to a Cas9 protein, and (c) an extension arm comprising (i) an editing template and (ii) a primer binding site (PBS) comprising at its 5′ end the sequence corresponding to sequence number 1933.

[0757] The PEgRNA spacer can be, for example, 16-22 nucleotides in length. In some embodiments, the PEgNA spacer is 16-20 nucleotides in length. In some embodiments, the PEgRNA spacer comprises nucleotides 5-20, 4-20, 3-20, 2-20, or 1-20 of sequence number 1918. In some embodiments, the PEgRNA spacer comprises the sequence of sequence number 1918. In some embodiments, the PEgRNA spacer is 20 nucleotides in length. Any of these spacers exemplified can be referred to as 3′ spacer No. 9.

[0758] The PBS can be, for example, 3 to 19 nucleotides in length. In some embodiments, the PBS is 3 to 17 nucleotides in length and corresponds to a PBS sequence in Table 20A. In some cases, a PBS length of no more than 3 nucleotides less than the PEgRNA spacer length is chosen.

[0759] The 3′ PEgRNAs of Tables 28A and 28B can be used in a dual prime editing system or composition further comprising any suitable 5′ PEgRNA. The prime editing system can be used, e.g., for editing a DMPK gene harboring 50 or more CTG repeats in the DMPK gene.

[0760] In some embodiments, a prime editing composition comprises a 3′ PEgRNA or component thereof exemplified in Tables 28A and 28B and a 5′ PEgRNA, wherein the editing template of the 3′ PEgRNA and the 5′ PEgRNA each comprises a region of complementarity to each other. For example, the editing template of the 3′ PEgRNA can comprise any of the RTT sequences provided in Table 38. The terms editing template and RTT may be used interchangeably. Each of the RTT sequences in Table 38 is assigned a RTT pairing number that reflects the complementarity relationship between a 5′ RTT and a 3′ RTT. The 3′ PEgRNA can be used in a dual prime editing system that further comprises a 5′ PEgRNA, e.g., a 5′ PEgRNA having a spacer sequence and a corresponding PBS as exemplified in Tables 1A-19B, wherein the 5′ PEgRNA comprises an editing template comprising a RTT sequence having a region of complementarity to the 3′ RTT. The 5′ RTT can comprise any of the RTT sequences provided in Table 37, wherein the 5′ RTT sequence has the same RTT Pairing number as that of the 3′ RTT. The editing template of the 5′ PEgRNA and the 3′ PEgRNA can be completely complementary to each other, wherein the 5′ editing template and the 3′ editing template have the same length and perfect complementarity to each other. Alternatively, the 5′ editing template can comprise a region of complementarity to the 3′ editing template, and further comprise a non-complementary region to the 3′ editing template. The 3′ editing template can comprise a region of complementarity to the 5′ editing template, and further comprise a non-complementary region to the 5′ editing template. The non-complementary region can be at the 5′ end or the 3′ end of the editing templates. Contacting the target DMPK gene with the prime editing system can result in deletion of the sequence between the 5′ PEgRNA nick and the 3′ PEgRNA nick (the IND) and insertion of the region of complementarity between the 5′ editing template and the 3′ editing template (the OD), or insertion of the region of complementarity between the 5′ editing template and the 3′ editing template as well as the non-complementarity regions (the RD), and hence replace the CTG expansion with the sequence of the OD or the RD. Each of the 3′ PEgRNA is assigned a RTT pairing number, and can be used in a dual prime editing composition with a 5′ PEgRNA comprising an RTT having the same RTT pairing number.

[0761] In some embodiments, a prime editing composition comprises a 3′ PEgRNA or component thereof exemplified in Tables 28A and 28B and a 5′ PEgRNA, wherein the editing template of the 3′ PEgRNA comprises a region of identity to the spacer of the 5′ PEgRNA. In some embodiments, the editing template of the 5′ PEgRNA comprises a region of identity to the spacer of the 3′ PEgRNA. In some embodiments, the 3′ editing template comprises a region of complementarity to a region on the first strand of the DMPK gene that is directly 3′ to nucleotide 3 of the search target sequence of the 5′ PEgRNA. In some embodiments, the 5′ editing template comprises a region of complementarity to a region on the second strand of the DMPK gene that is directly 3′ to nucleotide 3 of the search target sequence of the 3′ PEgRNA. For example, the extension arm of the 3′ PEgRNA can comprise an editing template comprising the sequence of any of the RTT sequences provided in Table 40. Each of the RTT sequences in Table 40 is assigned a pairing 5′ spacer number. The 3′ PEgRNA can be used in a dual prime editing system with a 5′ PEgRNA, wherein the 5′ PEgRNA comprises a spacer that has the Pairing 5′ spacer number assigned to the 3′ RTT in Table 40. Contacting the target DMPK gene with the prime editing system can result in deletion of the sequence between the 5′ PEgRNA nick and the 3′ PEgRNA nick (the IND) without insertion of any exogenous sequence (a “clean deletion”). Alternatively, the 5′ editing template and the 3′ editing template can further comprise a region of complementarity to each other, and the region of complementarity can replace the IND in the DMPK gene. For example, in some embodiments, the 3′ PEgRNA is part of a dual prime editing composition that further comprises a 5′ PEgRNA, wherein the 3′ PEgRNA comprises a RTT comprising a sequence selected from sequence numbers 3477-3479, and the 5′ PEgRNA comprises a spacer comprising nucleotides 5-20 of sequence number 484. In some embodiments, the 3′ PEgRNA is part of a dual prime editing composition that further comprises a 5′ PEgRNA, wherein the 3′ PEgRNA comprises a RTT comprising a sequence selected from sequence numbers 3480-3484, and the 5′ PEgRNA comprises a spacer comprising nucleotides 5-20 of sequence number 77. In some embodiments, the 3′ PEgRNA is part of a dual prime editing composition that further comprises a 5′ PEgRNA, wherein the 3′ PEgRNA comprises a RTT comprising a sequence selected from sequence numbers 3485-3489, and the 5′ PEgRNA comprises a spacer comprising nucleotides 5-20 of sequence number 590. In some embodiments, the 3′ PEgRNA is part of a dual prime editing composition that further comprises a 5′ PEgRNA, wherein the 3′ PEgRNA comprises a RTT comprising a sequence selected from sequence numbers 3490-3494, and the 5′ PEgRNA comprises a spacer comprising nucleotides 5-20 of sequence number 1019. In some embodiments, the 3′ PEgRNA is part of a dual prime editing composition that further comprises a 5′ PEgRNA, wherein the 3′ PEgRNA comprises a RTT comprising nucleotides x-40 of sequence number 3664, 3665, 3666, 3667, 3668, 3669, 3670, 3671, 3672, 3673, 3674, 3675, 3676, 3677, 3678, 3679, 3680, 3681, or 3682, wherein the 5′ PEgRNA comprises a spacer comprising nucleotides 5-20 of sequence number 518, 536, 554, 572, 590, 39, 912, 929, 947, 965, 983, 1001, 1019, 1341, 20, 77, 484, 58, or 1 respectively in the same order, and wherein x is any integer from 1 to 31. Each 3′ PEgRNA is assigned a RTT pairing number, which corresponds to a pairing 5′ spacer number in Table 40. The 3′ PEgRNA can be used in a dual prime editing system or composition with a 5′ PEgRNA comprising a spacer of the same pairing 5′ spacer number. Preferably, the 5′ PEgRNA comprises a “clean deletion” RTT, for example, an RTT selected from Table 39 that has a Pairing 3′ spacer number that is 9.

### Tables 30A and 30B

[0762] Tables 30A and 30B provide exemplary 3′ PEgRNAs and components that can be used with any prime editor containing a Cas9 protein capable of recognizing a NGG PAM sequence, wherein N is A, G, C, or T. The PEgRNAs exemplified in Tables 30A and 30B comprise: (a) a spacer comprising at its 3′ end a sequence corresponding to nucleotides 5-20 of sequence number 2263, (b) a gRNA core capable of binding to a Cas9 protein, and (c) an extension arm comprising (i) an editing template and (ii) a primer binding site (PBS) comprising at its 5′ end the sequence corresponding to sequence number 2278.

[0763] The PEgRNA spacer can be, for example, 16-22 nucleotides in length. In some embodiments, the PEgNA spacer is 16-20 nucleotides in length. In some embodiments, the PEgRNA spacer comprises nucleotides 5-20, 4-20, 3-20, 2-20, or 1-20 of sequence number 2263. In some embodiments, the PEgRNA spacer comprises the sequence of sequence number 2263. In some embodiments, the PEgRNA spacer is 20 nucleotides in length. Any of these spacers exemplified can be referred to as 3′ spacer No. 11.

[0764] The PBS can be, for example, 3 to 19 nucleotides in length. In some embodiments, the PBS is 3 to 17 nucleotides in length and corresponds to a PBS sequence in Table 20A. In some cases, a PBS length of no more than 3 nucleotides less than the PEgRNA spacer length is chosen.

[0765] The 3′ PEgRNAs of Tables 30A and 30B can be used in a dual prime editing system or composition further comprising any suitable 5′ PEgRNA. The prime editing system can be used, e.g., for editing a DMPK gene harboring 50 or more CTG repeats in the DMPK gene.

[0766] In some embodiments, a prime editing composition comprises a 3′ PEgRNA or component thereof exemplified in Tables 30A and 30B and a 5′ PEgRNA, wherein the editing template of the 3′ PEgRNA and the 5′ PEgRNA each comprises a region of complementarity to each other. For example, the editing template of the 3′ PEgRNA can comprise any of the RTT sequences provided in Table 38. The terms editing template and RTT may be used interchangeably. Each of the RTT sequences in Table 38 is assigned a RTT pairing number that reflects the complementarity relationship between a 5′ RTT and a 3′ RTT. The 3′ PEgRNA can be used in a dual prime editing system that further comprises a 5′ PEgRNA, e.g., a 5′ PEgRNA having a spacer sequence and a corresponding PBS as exemplified in Tables 1A-19B, wherein the 5′ PEgRNA comprises an editing template comprising a RTT sequence having a region of complementarity to the 3′ RTT. The 5′ RTT can comprise any of the RTT sequences provided in Table 37, wherein the 5′ RTT sequence has the same RTT Pairing number as that of the 3′ RTT. The editing template of the 5′ PEgRNA and the 3′ PEgRNA can be completely complementary to each other, wherein the 5′ editing template and the 3′ editing template have the same length and perfect complementarity to each other. Alternatively, the 5′ editing template can comprise a region of complementarity to the 3′ editing template, and further comprise a non-complementary region to the 3′ editing template. The 3′ editing template can comprise a region of complementarity to the 5′ editing template, and further comprise a non-complementary region to the 5′ editing template. The non-complementary region can be at the 5′ end or the 3′ end of the editing templates. Contacting the target DMPK gene with the prime editing system can result in deletion of the sequence between the 5′ PEgRNA nick and the 3′ PEgRNA nick (the IND) and insertion of the region of complementarity between the 5′ editing template and the 3′ editing template (the OD), or insertion of the region of complementarity between the 5′ editing template and the 3′ editing template as well as the non-complementarity regions (the RD), and hence replace the CTG expansion with the sequence of the OD or the RD. Each of the 3′ PEgRNA is assigned a RTT pairing number, and can be used in a dual prime editing composition with a 5′ PEgRNA comprising an RTT having the same RTT pairing number.

[0767] In some embodiments, a prime editing composition comprises a 3′ PEgRNA or component thereof exemplified in Tables 30A and 30B and a 5′ PEgRNA, wherein the editing template of the 3′ PEgRNA comprises a region of identity to the spacer of the 5′ PEgRNA. In some embodiments, the editing template of the 5′ PEgRNA comprises a region of identity to the spacer of the 3′ PEgRNA. In some embodiments, the 3′ editing template comprises a region of complementarity to a region on the first strand of the DMPK gene that is directly 3′ to nucleotide 3 of the search target sequence of the 5′ PEgRNA. In some embodiments, the 5′ editing template comprises a region of complementarity to a region on the second strand of the DMPK gene that is directly 3′ to nucleotide 3 of the search target sequence of the 3′ PEgRNA. For example, the extension arm of the 3′ PEgRNA can comprise an editing template comprising the sequence of any of the RTT sequences provided in Table 40. Each of the RTT sequences in Table 40 is assigned a pairing 5′ spacer number. The 3′ PEgRNA can be used in a dual prime editing system with a 5′ PEgRNA, wherein the 5′ PEgRNA comprises a spacer that has the Pairing 5′ spacer number assigned to the 3′ RTT in Table 40. Contacting the target DMPK gene with the prime editing system can result in deletion of the sequence between the 5′ PEgRNA nick and the 3′ PEgRNA nick (the IND) without insertion of any exogenous sequence (a “clean deletion”). Alternatively, the 5′ editing template and the 3′ editing template can further comprise a region of complementarity to each other, and the region of complementarity can replace the IND in the DMPK gene. For example, in some embodiments, the 3′ PEgRNA is part of a dual prime editing composition that further comprises a 5′ PEgRNA, wherein the 3′ PEgRNA comprises a RTT comprising a sequence selected from sequence numbers 3477-3479, and the 5′ PEgRNA comprises a spacer comprising nucleotides 5-20 of sequence number 484. In some embodiments, the 3′ PEgRNA is part of a dual prime editing composition that further comprises a 5′ PEgRNA, wherein the 3′ PEgRNA comprises a RTT comprising a sequence selected from sequence numbers 3480-3484, and the 5′ PEgRNA comprises a spacer comprising nucleotides 5-20 of sequence number 77. In some embodiments, the 3′ PEgRNA is part of a dual prime editing composition that further comprises a 5′ PEgRNA, wherein the 3′ PEgRNA comprises a RTT comprising a sequence selected from sequence numbers 3485-3489, and the 5′ PEgRNA comprises a spacer comprising nucleotides 5-20 of sequence number 590. In some embodiments, the 3′ PEgRNA is part of a dual prime editing composition that further comprises a 5′ PEgRNA, wherein the 3′ PEgRNA comprises a RTT comprising a sequence selected from sequence numbers 3490-3494, and the 5′ PEgRNA comprises a spacer comprising nucleotides 5-20 of sequence number 1019. In some embodiments, the 3′ PEgRNA is part of a dual prime editing composition that further comprises a 5′ PEgRNA, wherein the 3′ PEgRNA comprises a RTT comprising nucleotides x-40 of sequence number 3664, 3665, 3666, 3667, 3668, 3669, 3670, 3671, 3672, 3673, 3674, 3675, 3676, 3677, 3678, 3679, 3680, 3681, or 3682, wherein the 5′ PEgRNA comprises a spacer comprising nucleotides 5-20 of sequence number 518, 536, 554, 572, 590, 39, 912, 929, 947, 965, 983, 1001, 1019, 1341, 20, 77, 484, 58, or 1 respectively in the same order, and wherein x is any integer from 1 to 31. Each 3′ PEgRNA is assigned a RTT pairing number, which corresponds to a pairing 5′ spacer number in Table 40. The 3′ PEgRNA can be used in a dual prime editing system or composition with a 5′ PEgRNA comprising a spacer of the same pairing 5′ spacer number. Preferably, the 5′ PEgRNA comprises a “clean deletion” RTT, for example, an RTT selected from Table 39 that has a Pairing 3′ spacer number that is 11.

### Tables 31A and 31B

[0768] Tables 31A and 31B provide exemplary 3′ PEgRNAs and components that can be used with any prime editor containing a Cas9 protein capable of recognizing a NGG PAM sequence, wherein N is A, G, C, or T. The PEgRNAs exemplified in Tables 31A and 31B comprise: (a) a spacer comprising at its 3′ end a sequence corresponding to nucleotides 5-20 of sequence number 2281, (b) a gRNA core capable of binding to a Cas9 protein, and (c) an extension arm comprising (i) an editing template and (ii) a primer binding site (PBS) comprising at its 5′ end the sequence corresponding to sequence number 2296.

[0769] The PEgRNA spacer can be, for example, 16-22 nucleotides in length. In some embodiments, the PEgNA spacer is 16-20 nucleotides in length. In some embodiments, the PEgRNA spacer comprises nucleotides 5-20, 4-20, 3-20, 2-20, or 1-20 of sequence number 2281. In some embodiments, the PEgRNA spacer comprises the sequence of sequence number 2281. In some embodiments, the PEgRNA spacer is 20 nucleotides in length. Any of these spacers exemplified can be referred to as 3′ spacer No. 12.

[0770] The PBS can be, for example, 3 to 19 nucleotides in length. In some embodiments, the PBS is 3 to 17 nucleotides in length and corresponds to a PBS sequence in Table 20A. In some cases, a PBS length of no more than 3 nucleotides less than the PEgRNA spacer length is chosen.

[0771] The 3′ PEgRNAs of Tables 31A and 31B can be used in a dual prime editing system or composition further comprising any suitable 5′ PEgRNA. The prime editing system can be used, e.g., for editing a DMPK gene harboring 50 or more CTG repeats in the DMPK gene.

[0772] In some embodiments, a prime editing composition comprises a 3′ PEgRNA or component thereof exemplified in Tables 31A and 31B and a 5′ PEgRNA, wherein the editing template of the 3′ PEgRNA and the 5′ PEgRNA each comprises a region of complementarity to each other. For example, the editing template of the 3′ PEgRNA can comprise any of the RTT sequences provided in Table 38. The terms editing template and RTT may be used interchangeably. Each of the RTT sequences in Table 38 is assigned a RTT pairing number that reflects the complementarity relationship between a 5′ RTT and a 3′ RTT. The 3′ PEgRNA can be used in a dual prime editing system that further comprises a 5′ PEgRNA, e.g., a 5′ PEgRNA having a spacer sequence and a corresponding PBS as exemplified in Tables 1A-19B, wherein the 5′ PEgRNA comprises an editing template comprising a RTT sequence having a region of complementarity to the 3′ RTT. The 5′ RTT can comprise any of the RTT sequences provided in Table 37, wherein the 5′ RTT sequence has the same RTT Pairing number as that of the 3′ RTT. The editing template of the 5′ PEgRNA and the 3′ PEgRNA can be completely complementary to each other, wherein the 5′ editing template and the 3′ editing template have the same length and perfect complementarity to each other. Alternatively, the 5′ editing template can comprise a region of complementarity to the 3′ editing template, and further comprise a non-complementary region to the 3′ editing template. The 3′ editing template can comprise a region of complementarity to the 5′ editing template, and further comprise a non-complementary region to the 5′ editing template. The non-complementary region can be at the 5′ end or the 3′ end of the editing templates. Contacting the target DMPK gene with the prime editing system can result in deletion of the sequence between the 5′ PEgRNA nick and the 3′ PEgRNA nick (the IND) and insertion of the region of complementarity between the 5′ editing template and the 3′ editing template (the OD), or insertion of the region of complementarity between the 5′ editing template and the 3′ editing template as well as the non-complementarity regions (the RD), and hence replace the CTG expansion with the sequence of the OD or the RD. Each of the 3′ PEgRNA is assigned a RTT pairing number, and can be used in a dual prime editing composition with a 5′ PEgRNA comprising an RTT having the same RTT pairing number.

[0773] In some embodiments, a prime editing composition comprises a 3′ PEgRNA or component thereof exemplified in Tables 31A and 31B and a 5′ PEgRNA, wherein the editing template of the 3′ PEgRNA comprises a region of identity to the spacer of the 5′ PEgRNA. In some embodiments, the editing template of the 5′ PEgRNA comprises a region of identity to the spacer of the 3′ PEgRNA. In some embodiments, the 3′ editing template comprises a region of complementarity to a region on the first strand of the DMPK gene that is directly 3′ to nucleotide 3 of the search target sequence of the 5′ PEgRNA. In some embodiments, the 5′ editing template comprises a region of complementarity to a region on the second strand of the DMPK gene that is directly 3′ to nucleotide 3 of the search target sequence of the 3′ PEgRNA. For example, the extension arm of the 3′ PEgRNA can comprise an editing template comprising the sequence of any of the RTT sequences provided in Table 40. Each of the RTT sequences in Table 40 is assigned a pairing 5′ spacer number. The 3′ PEgRNA can be used in a dual prime editing system with a 5′ PEgRNA, wherein the 5′ PEgRNA comprises a spacer that has the Pairing 5′ spacer number assigned to the 3′ RTT in Table 40. Contacting the target DMPK gene with the prime editing system can result in deletion of the sequence between the 5′ PEgRNA nick and the 3′ PEgRNA nick (the IND) without insertion of any exogenous sequence (a “clean deletion”). Alternatively, the 5′ editing template and the 3′ editing template can further comprise a region of complementarity to each other, and the region of complementarity can replace the IND in the DMPK gene. For example, in some embodiments, the 3′ PEgRNA is part of a dual prime editing composition that further comprises a 5′ PEgRNA, wherein the 3′ PEgRNA comprises a RTT comprising a sequence selected from sequence numbers 3477-3479, and the 5′ PEgRNA comprises a spacer comprising nucleotides 5-20 of sequence number 484. In some embodiments, the 3′ PEgRNA is part of a dual prime editing composition that further comprises a 5′ PEgRNA, wherein the 3′ PEgRNA comprises a RTT comprising a sequence selected from sequence numbers 3480-3484, and the 5′ PEgRNA comprises a spacer comprising nucleotides 5-20 of sequence number 77. In some embodiments, the 3′ PEgRNA is part of a dual prime editing composition that further comprises a 5′ PEgRNA, wherein the 3′ PEgRNA comprises a RTT comprising a sequence selected from sequence numbers 3485-3489, and the 5′ PEgRNA comprises a spacer comprising nucleotides 5-20 of sequence number 590. In some embodiments, the 3′ PEgRNA is part of a dual prime editing composition that further comprises a 5′ PEgRNA, wherein the 3′ PEgRNA comprises a RTT comprising a sequence selected from sequence numbers 3490-3494, and the 5′ PEgRNA comprises a spacer comprising nucleotides 5-20 of sequence number 1019. In some embodiments, the 3′ PEgRNA is part of a dual prime editing composition that further comprises a 5′ PEgRNA, wherein the 3′ PEgRNA comprises a RTT comprising nucleotides x-40 of sequence number 3664, 3665, 3666, 3667, 3668, 3669, 3670, 3671, 3672, 3673, 3674, 3675, 3676, 3677, 3678, 3679, 3680, 3681, or 3682, wherein the 5′ PEgRNA comprises a spacer comprising nucleotides 5-20 of sequence number 518, 536, 554, 572, 590, 39, 912, 929, 947, 965, 983, 1001, 1019, 1341, 20, 77, 484, 58, or 1 respectively in the same order, and wherein x is any integer from 1 to 31. Each 3′ PEgRNA is assigned a RTT pairing number, which corresponds to a pairing 5′ spacer number in Table 40. The 3′ PEgRNA can be used in a dual prime editing system or composition with a 5′ PEgRNA comprising a spacer of the same pairing 5′ spacer number. Preferably, the 5′ PEgRNA comprises a “clean deletion” RTT, for example, an RTT selected from Table 39 that has a Pairing 3′ spacer number that is 12.

### Tables 32A and 32B

[0774] Tables 32A and 32B provide exemplary 3′ PEgRNAs and components that can be used with any prime editor containing a Cas9 protein capable of recognizing a NGG PAM sequence, wherein N is A, G, C, or T. The PEgRNAs exemplified in Tables 32A and 32B comprise: (a) a spacer comprising at its 3′ end a sequence corresponding to nucleotides 5-20 of sequence number 2299, (b) a gRNA core capable of binding to a Cas9 protein, and (c) an extension arm comprising (i) an editing template and (ii) a primer binding site (PBS) comprising at its 5′ end the sequence corresponding to sequence number 2314.

[0775] The PEgRNA spacer can be, for example, 16-22 nucleotides in length. In some embodiments, the PEgNA spacer is 16-20 nucleotides in length. In some embodiments, the PEgRNA spacer comprises nucleotides 5-20, 4-20, 3-20, 2-20, or 1-20 of sequence number 2299. In some embodiments, the PEgRNA spacer comprises the sequence of sequence number 2299. In some embodiments, the PEgRNA spacer is 20 nucleotides in length. Any of these spacers exemplified can be referred to as 3′ spacer No. 13.

[0776] The PBS can be, for example, 3 to 19 nucleotides in length. In some embodiments, the PBS is 3 to 17 nucleotides in length and corresponds to a PBS sequence in Table 20A. In some cases, a PBS length of no more than 3 nucleotides less than the PEgRNA spacer length is chosen.

[0777] The 3′ PEgRNAs of Tables 32A and 32B can be used in a dual prime editing system or composition further comprising any suitable 5′ PEgRNA. The prime editing system can be used, e.g., for editing a DMPK gene harboring 50 or more CTG repeats in the DMPK gene.

[0778] In some embodiments, a prime editing composition comprises a 3′ PEgRNA or component thereof exemplified in Tables 32A and 32B and a 5′ PEgRNA, wherein the editing template of the 3′ PEgRNA and the 5′ PEgRNA each comprises a region of complementarity to each other. For example, the editing template of the 3′ PEgRNA can comprise any of the RTT sequences provided in Table 38. The terms editing template and RTT may be used interchangeably. Each of the RTT sequences in Table 38 is assigned a RTT pairing number that reflects the complementarity relationship between a 5′ RTT and a 3′ RTT. The 3′ PEgRNA can be used in a dual prime editing system that further comprises a 5′ PEgRNA, e.g., a 5′ PEgRNA having a spacer sequence and a corresponding PBS as exemplified in Tables 1A-19B, wherein the 5′ PEgRNA comprises an editing template comprising a RTT sequence having a region of complementarity to the 3′ RTT. The 5′ RTT can comprise any of the RTT sequences provided in Table 37, wherein the 5′ RTT sequence has the same RTT Pairing number as that of the 3′ RTT. The editing template of the 5′ PEgRNA and the 3′ PEgRNA can be completely complementary to each other, wherein the 5′ editing template and the 3′ editing template have the same length and perfect complementarity to each other. Alternatively, the 5′ editing template can comprise a region of complementarity to the 3′ editing template, and further comprise a non-complementary region to the 3′ editing template. The 3′ editing template can comprise a region of complementarity to the 5′ editing template, and further comprise a non-complementary region to the 5′ editing template. The non-complementary region can be at the 5′ end or the 3′ end of the editing templates. Contacting the target DMPK gene with the prime editing system can result in deletion of the sequence between the 5′ PEgRNA nick and the 3′ PEgRNA nick (the IND) and insertion of the region of complementarity between the 5′ editing template and the 3′ editing template (the OD), or insertion of the region of complementarity between the 5′ editing template and the 3′ editing template as well as the non-complementarity regions (the RD), and hence replace the CTG expansion with the sequence of the OD or the RD. Each of the 3′ PEgRNA is assigned a RTT pairing number, and can be used in a dual prime editing composition with a 5′ PEgRNA comprising an RTT having the same RTT pairing number.

[0779] In some embodiments, a prime editing composition comprises a 3′ PEgRNA or component thereof exemplified in Tables 32A and 32B and a 5′ PEgRNA, wherein the editing template of the 3′ PEgRNA comprises a region of identity to the spacer of the 5′ PEgRNA. In some embodiments, the editing template of the 5′ PEgRNA comprises a region of identity to the spacer of the 3′ PEgRNA. In some embodiments, the 3′ editing template comprises a region of complementarity to a region on the first strand of the DMPK gene that is directly 3′ to nucleotide 3 of the search target sequence of the 5′ PEgRNA. In some embodiments, the 5′ editing template comprises a region of complementarity to a region on the second strand of the DMPK gene that is directly 3′ to nucleotide 3 of the search target sequence of the 3′ PEgRNA. For example, the extension arm of the 3′ PEgRNA can comprise an editing template comprising the sequence of any of the RTT sequences provided in Table 40. Each of the RTT sequences in Table 40 is assigned a pairing 5′ spacer number. The 3′ PEgRNA can be used in a dual prime editing system with a 5′ PEgRNA, wherein the 5′ PEgRNA comprises a spacer that has the Pairing 5′ spacer number assigned to the 3′ RTT in Table 40. Contacting the target DMPK gene with the prime editing system can result in deletion of the sequence between the 5′ PEgRNA nick and the 3′ PEgRNA nick (the IND) without insertion of any exogenous sequence (a “clean deletion”). Alternatively, the 5′ editing template and the 3′ editing template can further comprise a region of complementarity to each other, and the region of complementarity can replace the IND in the DMPK gene. For example, in some embodiments, the 3′ PEgRNA is part of a dual prime editing composition that further comprises a 5′ PEgRNA, wherein the 3′ PEgRNA comprises a RTT comprising a sequence selected from sequence numbers 3477-3479, and the 5′ PEgRNA comprises a spacer comprising nucleotides 5-20 of sequence number 484. In some embodiments, the 3′ PEgRNA is part of a dual prime editing composition that further comprises a 5′ PEgRNA, wherein the 3′ PEgRNA comprises a RTT comprising a sequence selected from sequence numbers 3480-3484, and the 5′ PEgRNA comprises a spacer comprising nucleotides 5-20 of sequence number 77. In some embodiments, the 3′ PEgRNA is part of a dual prime editing composition that further comprises a 5′ PEgRNA, wherein the 3′ PEgRNA comprises a RTT comprising a sequence selected from sequence numbers 3485-3489, and the 5′ PEgRNA comprises a spacer comprising nucleotides 5-20 of sequence number 590. In some embodiments, the 3′ PEgRNA is part of a dual prime editing composition that further comprises a 5′ PEgRNA, wherein the 3′ PEgRNA comprises a RTT comprising a sequence selected from sequence numbers 3490-3494, and the 5′ PEgRNA comprises a spacer comprising nucleotides 5-20 of sequence number 1019. In some embodiments, the 3′ PEgRNA is part of a dual prime editing composition that further comprises a 5′ PEgRNA, wherein the 3′ PEgRNA comprises a RTT comprising nucleotides x-40 of sequence number 3664, 3665, 3666, 3667, 3668, 3669, 3670, 3671, 3672, 3673, 3674, 3675, 3676, 3677, 3678, 3679, 3680, 3681, or 3682, wherein the 5′ PEgRNA comprises a spacer comprising nucleotides 5-20 of sequence number 518, 536, 554, 572, 590, 39, 912, 929, 947, 965, 983, 1001, 1019, 1341, 20, 77, 484, 58, or 1 respectively in the same order, and wherein x is any integer from 1 to 31. Each 3′ PEgRNA is assigned a RTT pairing number, which corresponds to a pairing 5′ spacer number in Table 40. The 3′ PEgRNA can be used in a dual prime editing system or composition with a 5′ PEgRNA comprising a spacer of the same pairing 5′ spacer number. Preferably, the 5′ PEgRNA comprises a “clean deletion” RTT, for example, an RTT selected from Table 39 that has a Pairing 3′ spacer number that is 13.

### Tables 33A and 33B

[0780] Tables 33A and 33B provide exemplary 3′ PEgRNAs and components that can be used with any prime editor containing a Cas9 protein capable of recognizing a NGG PAM sequence, wherein N is A, G, C, or T. The PEgRNAs exemplified in Tables 33A and 33B comprise: (a) a spacer comprising at its 3′ end a sequence corresponding to nucleotides 5-20 of sequence number 2317, (b) a gRNA core capable of binding to a Cas9 protein, and (c) an extension arm comprising (i) an editing template and (ii) a primer binding site (PBS) comprising at its 5′ end the sequence corresponding to sequence number 2332.

[0781] The PEgRNA spacer can be, for example, 16-22 nucleotides in length. In some embodiments, the PEgNA spacer is 16-20 nucleotides in length. In some embodiments, the PEgRNA spacer comprises nucleotides 5-20, 4-20, 3-20, 2-20, or 1-20 of sequence number 2317. In some embodiments, the PEgRNA spacer comprises the sequence of sequence number 2317. In some embodiments, the PEgRNA spacer is 20 nucleotides in length. Any of these spacers exemplified can be referred to as 3′ spacer No. 14.

[0782] The PBS can be, for example, 3 to 19 nucleotides in length. In some embodiments, the PBS is 3 to 17 nucleotides in length and corresponds to a PBS sequence in Table 20A. In some cases, a PBS length of no more than 3 nucleotides less than the PEgRNA spacer length is chosen.

[0783] The 3′ PEgRNAs of Tables 33A and 33B can be used in a dual prime editing system or composition further comprising any suitable 5′ PEgRNA. The prime editing system can be used, e.g., for editing a DMPK gene harboring 50 or more CTG repeats in the DMPK gene.

[0784] In some embodiments, a prime editing composition comprises a 3′ PEgRNA or component thereof exemplified in Tables 33A and 33B and a 5′ PEgRNA, wherein the editing template of the 3′ PEgRNA and the 5′ PEgRNA each comprises a region of complementarity to each other. For example, the editing template of the 3′ PEgRNA can comprise any of the RTT sequences provided in Table 38. The terms editing template and RTT may be used interchangeably. Each of the RTT sequences in Table 38 is assigned a RTT pairing number that reflects the complementarity relationship between a 5′ RTT and a 3′ RTT. The 3′ PEgRNA can be used in a dual prime editing system that further comprises a 5′ PEgRNA, e.g., a 5′ PEgRNA having a spacer sequence and a corresponding PBS as exemplified in Tables 1A-19B, wherein the 5′ PEgRNA comprises an editing template comprising a RTT sequence having a region of complementarity to the 3′ RTT. The 5′ RTT can comprise any of the RTT sequences provided in Table 37, wherein the 5′ RTT sequence has the same RTT Pairing number as that of the 3′ RTT. The editing template of the 5′ PEgRNA and the 3′ PEgRNA can be completely complementary to each other, wherein the 5′ editing template and the 3′ editing template have the same length and perfect complementarity to each other. Alternatively, the 5′ editing template can comprise a region of complementarity to the 3′ editing template, and further comprise a non-complementary region to the 3′ editing template. The 3′ editing template can comprise a region of complementarity to the 5′ editing template, and further comprise a non-complementary region to the 5′ editing template. The non-complementary region can be at the 5′ end or the 3′ end of the editing templates. Contacting the target DMPK gene with the prime editing system can result in deletion of the sequence between the 5′ PEgRNA nick and the 3′ PEgRNA nick (the IND) and insertion of the region of complementarity between the 5′ editing template and the 3′ editing template (the OD), or insertion of the region of complementarity between the 5′ editing template and the 3′ editing template as well as the non-complementarity regions (the RD), and hence replace the CTG expansion with the sequence of the OD or the RD. Each of the 3′ PEgRNA is assigned a RTT pairing number, and can be used in a dual prime editing composition with a 5′ PEgRNA comprising an RTT having the same RTT pairing number.

[0785] In some embodiments, a prime editing composition comprises a 3′ PEgRNA or component thereof exemplified in Tables 33A and 33B and a 5′ PEgRNA, wherein the editing template of the 3′ PEgRNA comprises a region of identity to the spacer of the 5′ PEgRNA. In some embodiments, the editing template of the 5′ PEgRNA comprises a region of identity to the spacer of the 3′ PEgRNA. In some embodiments, the 3′ editing template comprises a region of complementarity to a region on the first strand of the DMPK gene that is directly 3′ to nucleotide 3 of the search target sequence of the 5′ PEgRNA. In some embodiments, the 5′ editing template comprises a region of complementarity to a region on the second strand of the DMPK gene that is directly 3′ to nucleotide 3 of the search target sequence of the 3′ PEgRNA. For example, the extension arm of the 3′ PEgRNA can comprise an editing template comprising the sequence of any of the RTT sequences provided in Table 40. Each of the RTT sequences in Table 40 is assigned a pairing 5′ spacer number. The 3′ PEgRNA can be used in a dual prime editing system with a 5′ PEgRNA, wherein the 5′ PEgRNA comprises a spacer that has the Pairing 5′ spacer number assigned to the 3′ RTT in Table 40. Contacting the target DMPK gene with the prime editing system can result in deletion of the sequence between the 5′ PEgRNA nick and the 3′ PEgRNA nick (the IND) without insertion of any exogenous sequence (a “clean deletion”). Alternatively, the 5′ editing template and the 3′ editing template can further comprise a region of complementarity to each other, and the region of complementarity can replace the IND in the DMPK gene. For example, in some embodiments, the 3′ PEgRNA is part of a dual prime editing composition that further comprises a 5′ PEgRNA, wherein the 3′ PEgRNA comprises a RTT comprising a sequence selected from sequence numbers 3477-3479, and the 5′ PEgRNA comprises a spacer comprising nucleotides 5-20 of sequence number 484. In some embodiments, the 3′ PEgRNA is part of a dual prime editing composition that further comprises a 5′ PEgRNA, wherein the 3′ PEgRNA comprises a RTT comprising a sequence selected from sequence numbers 3480-3484, and the 5′ PEgRNA comprises a spacer comprising nucleotides 5-20 of sequence number 77. In some embodiments, the 3′ PEgRNA is part of a dual prime editing composition that further comprises a 5′ PEgRNA, wherein the 3′ PEgRNA comprises a RTT comprising a sequence selected from sequence numbers 3485-3489, and the 5′ PEgRNA comprises a spacer comprising nucleotides 5-20 of sequence number 590. In some embodiments, the 3′ PEgRNA is part of a dual prime editing composition that further comprises a 5′ PEgRNA, wherein the 3′ PEgRNA comprises a RTT comprising a sequence selected from sequence numbers 3490-3494, and the 5′ PEgRNA comprises a spacer comprising nucleotides 5-20 of sequence number 1019. In some embodiments, the 3′ PEgRNA is part of a dual prime editing composition that further comprises a 5′ PEgRNA, wherein the 3′ PEgRNA comprises a RTT comprising nucleotides x-40 of sequence number 3664, 3665, 3666, 3667, 3668, 3669, 3670, 3671, 3672, 3673, 3674, 3675, 3676, 3677, 3678, 3679, 3680, 3681, or 3682, wherein the 5′ PEgRNA comprises a spacer comprising nucleotides 5-20 of sequence number 518, 536, 554, 572, 590, 39, 912, 929, 947, 965, 983, 1001, 1019, 1341, 20, 77, 484, 58, or 1 respectively in the same order, and wherein x is any integer from 1 to 31. Each 3′ PEgRNA is assigned a RTT pairing number, which corresponds to a pairing 5′ spacer number in Table 40. The 3′ PEgRNA can be used in a dual prime editing system or composition with a 5′ PEgRNA comprising a spacer of the same pairing 5′ spacer number. Preferably, the 5′ PEgRNA comprises a “clean deletion” RTT, for example, an RTT selected from Table 39 that has a Pairing 3′ spacer number that is 14.

### Tables 34A and 34B

[0786] Tables 34A and 34B provide exemplary 3′ PEgRNAs and components that can be used with any prime editor containing a Cas9 protein capable of recognizing a NGG PAM sequence, wherein N is A, G, C, or T. The PEgRNAs exemplified in Tables 34A and 34B comprise: (a) a spacer comprising at its 3′ end a sequence corresponding to nucleotides 5-20 of sequence number 2335, (b) a gRNA core capable of binding to a Cas9 protein, and (c) an extension arm comprising (i) an editing template and (ii) a primer binding site (PBS) comprising at its 5′ end the sequence corresponding to sequence number 2350.

[0787] The PEgRNA spacer can be, for example, 16-22 nucleotides in length. In some embodiments, the PEgNA spacer is 16-20 nucleotides in length. In some embodiments, the PEgRNA spacer comprises nucleotides 5-20, 4-20, 3-20, 2-20, or 1-20 of sequence number 2335. In some embodiments, the PEgRNA spacer comprises the sequence of sequence number 2335. In some embodiments, the PEgRNA spacer is 20 nucleotides in length. Any of these spacers exemplified can be referred to as 3′ spacer No. 15.

[0788] The PBS can be, for example, 3 to 19 nucleotides in length. In some embodiments, the PBS is 3 to 17 nucleotides in length and corresponds to a PBS sequence in Table 20A. In some cases, a PBS length of no more than 3 nucleotides less than the PEgRNA spacer length is chosen.

[0789] The 3′ PEgRNAs of Tables 34A and 34B can be used in a dual prime editing system or composition further comprising any suitable 5′ PEgRNA. The prime editing system can be used, e.g., for editing a DMPK gene harboring 50 or more CTG repeats in the DMPK gene.

[0790] In some embodiments, a prime editing composition comprises a 3′ PEgRNA or component thereof exemplified in Tables 34A and 34B and a 5′ PEgRNA, wherein the editing template of the 3′ PEgRNA and the 5′ PEgRNA each comprises a region of complementarity to each other. For example, the editing template of the 3′ PEgRNA can comprise any of the RTT sequences provided in Table 38. The terms editing template and RTT may be used interchangeably. Each of the RTT sequences in Table 38 is assigned a RTT pairing number that reflects the complementarity relationship between a 5′ RTT and a 3′ RTT. The 3′ PEgRNA can be used in a dual prime editing system that further comprises a 5′ PEgRNA, e.g., a 5′ PEgRNA having a spacer sequence and a corresponding PBS as exemplified in Tables 1A-19B, wherein the 5′ PEgRNA comprises an editing template comprising a RTT sequence having a region of complementarity to the 3′ RTT. The 5′ RTT can comprise any of the RTT sequences provided in Table 37, wherein the 5′ RTT sequence has the same RTT Pairing number as that of the 3′ RTT. The editing template of the 5′ PEgRNA and the 3′ PEgRNA can be completely complementary to each other, wherein the 5′ editing template and the 3′ editing template have the same length and perfect complementarity to each other. Alternatively, the 5′ editing template can comprise a region of complementarity to the 3′ editing template, and further comprise a non-complementary region to the 3′ editing template. The 3′ editing template can comprise a region of complementarity to the 5′ editing template, and further comprise a non-complementary region to the 5′ editing template. The non-complementary region can be at the 5′ end or the 3′ end of the editing templates. Contacting the target DMPK gene with the prime editing system can result in deletion of the sequence between the 5′ PEgRNA nick and the 3′ PEgRNA nick (the IND) and insertion of the region of complementarity between the 5′ editing template and the 3′ editing template (the OD), or insertion of the region of complementarity between the 5′ editing template and the 3′ editing template as well as the non-complementarity regions (the RD), and hence replace the CTG expansion with the sequence of the OD or the RD. Each of the 3′ PEgRNA is assigned a RTT pairing number, and can be used in a dual prime editing composition with a 5′ PEgRNA comprising an RTT having the same RTT pairing number.

[0791] In some embodiments, a prime editing composition comprises a 3′ PEgRNA or component thereof exemplified in Tables 34A and 34B and a 5′ PEgRNA, wherein the editing template of the 3′ PEgRNA comprises a region of identity to the spacer of the 5′ PEgRNA. In some embodiments, the editing template of the 5′ PEgRNA comprises a region of identity to the spacer of the 3′ PEgRNA. In some embodiments, the 3′ editing template comprises a region of complementarity to a region on the first strand of the DMPK gene that is directly 3′ to nucleotide 3 of the search target sequence of the 5′ PEgRNA. In some embodiments, the 5′ editing template comprises a region of complementarity to a region on the second strand of the DMPK gene that is directly 3′ to nucleotide 3 of the search target sequence of the 3′ PEgRNA. For example, the extension arm of the 3′ PEgRNA can comprise an editing template comprising the sequence of any of the RTT sequences provided in Table 40. Each of the RTT sequences in Table 40 is assigned a pairing 5′ spacer number. The 3′ PEgRNA can be used in a dual prime editing system with a 5′ PEgRNA, wherein the 5′ PEgRNA comprises a spacer that has the Pairing 5′ spacer number assigned to the 3′ RTT in Table 40. Contacting the target DMPK gene with the prime editing system can result in deletion of the sequence between the 5′ PEgRNA nick and the 3′ PEgRNA nick (the IND) without insertion of any exogenous sequence (a “clean deletion”). Alternatively, the 5′ editing template and the 3′ editing template can further comprise a region of complementarity to each other, and the region of complementarity can replace the IND in the DMPK gene. For example, in some embodiments, the 3′ PEgRNA is part of a dual prime editing composition that further comprises a 5′ PEgRNA, wherein the 3′ PEgRNA comprises a RTT comprising a sequence selected from sequence numbers 3477-3479, and the 5′ PEgRNA comprises a spacer comprising nucleotides 5-20 of sequence number 484. In some embodiments, the 3′ PEgRNA is part of a dual prime editing composition that further comprises a 5′ PEgRNA, wherein the 3′ PEgRNA comprises a RTT comprising a sequence selected from sequence numbers 3480-3484, and the 5′ PEgRNA comprises a spacer comprising nucleotides 5-20 of sequence number 77. In some embodiments, the 3′ PEgRNA is part of a dual prime editing composition that further comprises a 5′ PEgRNA, wherein the 3′ PEgRNA comprises a RTT comprising a sequence selected from sequence numbers 3485-3489, and the 5′ PEgRNA comprises a spacer comprising nucleotides 5-20 of sequence number 590. In some embodiments, the 3′ PEgRNA is part of a dual prime editing composition that further comprises a 5′ PEgRNA, wherein the 3′ PEgRNA comprises a RTT comprising a sequence selected from sequence numbers 3490-3494, and the 5′ PEgRNA comprises a spacer comprising nucleotides 5-20 of sequence number 1019. In some embodiments, the 3′ PEgRNA is part of a dual prime editing composition that further comprises a 5′ PEgRNA, wherein the 3′ PEgRNA comprises a RTT comprising nucleotides x-40 of sequence number 3664, 3665, 3666, 3667, 3668, 3669, 3670, 3671, 3672, 3673, 3674, 3675, 3676, 3677, 3678, 3679, 3680, 3681, or 3682, wherein the 5′ PEgRNA comprises a spacer comprising nucleotides 5-20 of sequence number 518, 536, 554, 572, 590, 39, 912, 929, 947, 965, 983, 1001, 1019, 1341, 20, 77, 484, 58, or 1 respectively in the same order, and wherein x is any integer from 1 to 31. Each 3′ PEgRNA is assigned a RTT pairing number, which corresponds to a pairing 5′ spacer number in Table 40. The 3′ PEgRNA can be used in a dual prime editing system or composition with a 5′ PEgRNA comprising a spacer of the same pairing 5′ spacer number. Preferably, the 5′ PEgRNA comprises a “clean deletion” RTT, for example, an RTT selected from Table 39 that has a Pairing 3′ spacer number that is 15.

### Tables 35A and 35B

[0792] Tables 35A and 35B provide exemplary 3′ PEgRNAs and components that can be used with any prime editor containing a Cas9 protein capable of recognizing a NGG PAM sequence, wherein N is A, G, C, or T. The PEgRNAs exemplified in Tables 35A and 35B comprise: (a) a spacer comprising at its 3′ end a sequence corresponding to nucleotides 5-20 of sequence number 2353, (b) a gRNA core capable of binding to a Cas9 protein, and (c) an extension arm comprising (i) an editing template and (ii) a primer binding site (PBS) comprising at its 5′ end the sequence corresponding to sequence number 2368.

[0793] The PEgRNA spacer can be, for example, 16-22 nucleotides in length. In some embodiments, the PEgNA spacer is 16-20 nucleotides in length. In some embodiments, the PEgRNA spacer comprises nucleotides 5-20, 4-20, 3-20, 2-20, or 1-20 of sequence number 2353. In some embodiments, the PEgRNA spacer comprises the sequence of sequence number 2353. In some embodiments, the PEgRNA spacer is 20 nucleotides in length. Any of these spacers exemplified can be referred to as 3′ spacer No. 16.

[0794] The PBS can be, for example, 3 to 19 nucleotides in length. In some embodiments, the PBS is 3 to 17 nucleotides in length and corresponds to a PBS sequence in Table 20A. In some cases, a PBS length of no more than 3 nucleotides less than the PEgRNA spacer length is chosen.

[0795] The 3′ PEgRNAs of Tables 35A and 35B can be used in a dual prime editing system or composition further comprising any suitable 5′ PEgRNA. The prime editing system can be used, e.g., for editing a DMPK gene harboring 50 or more CTG repeats in the DMPK gene.

[0796] In some embodiments, a prime editing composition comprises a 3′ PEgRNA or component thereof exemplified in Tables 35A and 35B and a 5′ PEgRNA, wherein the editing template of the 3′ PEgRNA and the 5′ PEgRNA each comprises a region of complementarity to each other. For example, the editing template of the 3′ PEgRNA can comprise any of the RTT sequences provided in Table 38. The terms editing template and RTT may be used interchangeably. Each of the RTT sequences in Table 38 is assigned a RTT pairing number that reflects the complementarity relationship between a 5′ RTT and a 3′ RTT. The 3′ PEgRNA can be used in a dual prime editing system that further comprises a 5′ PEgRNA, e.g., a 5′ PEgRNA having a spacer sequence and a corresponding PBS as exemplified in Tables 1A-19B, wherein the 5′ PEgRNA comprises an editing template comprising a RTT sequence having a region of complementarity to the 3′ RTT. The 5′ RTT can comprise any of the RTT sequences provided in Table 37, wherein the 5′ RTT sequence has the same RTT Pairing number as that of the 3′ RTT. The editing template of the 5′ PEgRNA and the 3′ PEgRNA can be completely complementary to each other, wherein the 5′ editing template and the 3′ editing template have the same length and perfect complementarity to each other. Alternatively, the 5′ editing template can comprise a region of complementarity to the 3′ editing template, and further comprise a non-complementary region to the 3′ editing template. The 3′ editing template can comprise a region of complementarity to the 5′ editing template, and further comprise a non-complementary region to the 5′ editing template. The non-complementary region can be at the 5′ end or the 3′ end of the editing templates. Contacting the target DMPK gene with the prime editing system can result in deletion of the sequence between the 5′ PEgRNA nick and the 3′ PEgRNA nick (the IND) and insertion of the region of complementarity between the 5′ editing template and the 3′ editing template (the OD), or insertion of the region of complementarity between the 5′ editing template and the 3′ editing template as well as the non-complementarity regions (the RD), and hence replace the CTG expansion with the sequence of the OD or the RD. Each of the 3′ PEgRNA is assigned a RTT pairing number, and can be used in a dual prime editing composition with a 5′ PEgRNA comprising an RTT having the same RTT pairing number.

[0797] In some embodiments, a prime editing composition comprises a 3′ PEgRNA or component thereof exemplified in Tables 35A and 35B and a 5′ PEgRNA, wherein the editing template of the 3′ PEgRNA comprises a region of identity to the spacer of the 5′ PEgRNA. In some embodiments, the editing template of the 5′ PEgRNA comprises a region of identity to the spacer of the 3′ PEgRNA. In some embodiments, the 3′ editing template comprises a region of complementarity to a region on the first strand of the DMPK gene that is directly 3′ to nucleotide 3 of the search target sequence of the 5′ PEgRNA. In some embodiments, the 5′ editing template comprises a region of complementarity to a region on the second strand of the DMPK gene that is directly 3′ to nucleotide 3 of the search target sequence of the 3′ PEgRNA. For example, the extension arm of the 3′ PEgRNA can comprise an editing template comprising the sequence of any of the RTT sequences provided in Table 40. Each of the RTT sequences in Table 40 is assigned a pairing 5′ spacer number. The 3′ PEgRNA can be used in a dual prime editing system with a 5′ PEgRNA, wherein the 5′ PEgRNA comprises a spacer that has the Pairing 5′ spacer number assigned to the 3′ RTT in Table 40. Contacting the target DMPK gene with the prime editing system can result in deletion of the sequence between the 5′ PEgRNA nick and the 3′ PEgRNA nick (the IND) without insertion of any exogenous sequence (a “clean deletion”). Alternatively, the 5′ editing template and the 3′ editing template can further comprise a region of complementarity to each other, and the region of complementarity can replace the IND in the DMPK gene. For example, in some embodiments, the 3′ PEgRNA is part of a dual prime editing composition that further comprises a 5′ PEgRNA, wherein the 3′ PEgRNA comprises a RTT comprising a sequence selected from sequence numbers 3477-3479, and the 5′ PEgRNA comprises a spacer comprising nucleotides 5-20 of sequence number 484. In some embodiments, the 3′ PEgRNA is part of a dual prime editing composition that further comprises a 5′ PEgRNA, wherein the 3′ PEgRNA comprises a RTT comprising a sequence selected from sequence numbers 3480-3484, and the 5′ PEgRNA comprises a spacer comprising nucleotides 5-20 of sequence number 77. In some embodiments, the 3′ PEgRNA is part of a dual prime editing composition that further comprises a 5′ PEgRNA, wherein the 3′ PEgRNA comprises a RTT comprising a sequence selected from sequence numbers 3485-3489, and the 5′ PEgRNA comprises a spacer comprising nucleotides 5-20 of sequence number 590. In some embodiments, the 3′ PEgRNA is part of a dual prime editing composition that further comprises a 5′ PEgRNA, wherein the 3′ PEgRNA comprises a RTT comprising a sequence selected from sequence numbers 3490-3494, and the 5′ PEgRNA comprises a spacer comprising nucleotides 5-20 of sequence number 1019. In some embodiments, the 3′ PEgRNA is part of a dual prime editing composition that further comprises a 5′ PEgRNA, wherein the 3′ PEgRNA comprises a RTT comprising nucleotides x-40 of sequence number 3664, 3665, 3666, 3667, 3668, 3669, 3670, 3671, 3672, 3673, 3674, 3675, 3676, 3677, 3678, 3679, 3680, 3681, or 3682, wherein the 5′ PEgRNA comprises a spacer comprising nucleotides 5-20 of sequence number 518, 536, 554, 572, 590, 39, 912, 929, 947, 965, 983, 1001, 1019, 1341, 20, 77, 484, 58, or 1 respectively in the same order, and wherein x is any integer from 1 to 31. Each 3′ PEgRNA is assigned a RTT pairing number, which corresponds to a pairing 5′ spacer number in Table 40. The 3′ PEgRNA can be used in a dual prime editing system or composition with a 5′ PEgRNA comprising a spacer of the same pairing 5′ spacer number. Preferably, the 5′ PEgRNA comprises a “clean deletion” RTT, for example, an RTT selected from Table 39 that has a Pairing 3′ spacer number that is 16.

[0798] Sequences of exemplary editing templates (or RTTs) are provided in Tables 37-42. Although all the sequences provided in Tables 37-42 are RNA sequences, “T” is used instead of a “U” in the sequences for consistency with the ST.26 standard used in the accompanying sequence listing.

[0799] Tables 37 and 38 provide exemplary 5′ RTTs and 3′ RTTs, respectively, wherein the 5′ RTT and the 3′ RTT each comprises a region of complementarity to each other. Tables 37 and 38 each includes five columns: from left to right, the first column provides the actual sequence of the RTT, the second column provides the SEQ ID NO., the third column provides the RTT length (in these RTTs, also the complementarity region length between two pairing PEgRNAs), the fourth column provides the GC content of the RTT, and the fifth column provides a RTT Paring number. For each 5′ RTT in Table 37 having a specific RTT Paring number, a 5′ PEgRNA comprising the 5′ RTT can be used in a dual prime editing system further comprising a 3′ PEgRNA, wherein the 3′ PEgRNA has the same RTT Paring number as assigned in Table 38. Although the pairing 5′ RTT and 3′ RTT sequences exemplified in Tables 37 and 38 have the same length and are perfectly complementary to each other, a skilled person understands that a 5′ RTT and/or a 3′ RTT can comprise additional nucleotides that are not complementary to the opposite side RTT.

TABLE 37
Exemplary 5′ RTT sequences

| | | | | RTT |
|---|---|---|---|---|
| | SEQ ID | RTT | RTT GC | Pairing |
| Sequence | NO: | length | content | NO: |
| GGCTTGTCGACGACGGCGGTCTCCGTCGTCAGGATCAT | 2691 | 38 | 0.63 | 1 |
| TTTCCAAGATTTGCAACCGGCAACTGTATGCTATTACC | 2692 | 38 | 0.421052632 | 2 |
| TATTGTTCCGGTTTATCACGAAGCGTACTCGGATTACA | 2693 | 38 | 0.421052632 | 3 |
| TATCGCACCACCCTATGCGTTCCATATCAATACTTATC | 2694 | 38 | 0.421052632 | 4 |
| TTCGTCTACAGTATCCTTCTTTCAACCTATTCACCGCA | 2695 | 38 | 0.421052632 | 5 |
| TGTTATGGTGTGAATACTTCATGGCGGATGATTTCCAC | 2696 | 38 | 0.421052632 | 6 |
| TATGTATACGAAGCCCATGCAAACATATTGCCGATCCA | 2697 | 38 | 0.421052632 | 7 |
| TTACCGTGTCTACATGGTATTTGGCATTTGCGATTACC | 2698 | 38 | 0.421052632 | 8 |
| TATACAAGGTACATATACCAACGGGCACTCCAACAGAA | 2699 | 38 | 0.421052632 | 9 |
| TTACTGCGTATACTTGGAAATTTACACGTCCAGAGGGA | 2700 | 38 | 0.421052632 | 10 |
| TGTATGTACAGGGTATACGGTCAGGATATGGCACCGCC | 2701 | 38 | 0.526315789 | 11 |
| TCACCCTCGACAAGTACAGGTACTCGAATGCACGGACA | 2702 | 38 | 0.526315789 | 12 |
| TTCCGAAAGCTTTCGCTCTCTCAGGCGTATTCTGGAGC | 2703 | 38 | 0.526315789 | 13 |
| TGGCGGAGAAATCAATTGCTCTCAACCCGTGTTGCTCC | 2704 | 38 | 0.526315789 | 14 |
| TCACGTTCCTCATCTTGTTACCACGTGCAGGCCCATAC | 2705 | 38 | 0.526315789 | 15 |
| TCTCGTCAAGGGAACCAAACACGAGTATGTGTGGGCTC | 2706 | 38 | 0.526315789 | 16 |
| TATACTGTGCGCCGACATACGAGGGTTTCCTGTCACTC | 2707 | 38 | 0.526315789 | 17 |
| TCTCTGGAATCTTTCGTTTCTCACGGGTGTGGTGTGGC | 2708 | 38 | 0.526315789 | 18 |
| TACCTATGTACACCAGAACCAGTCCTCGTGTGCTCCAC | 2709 | 38 | 0.526315789 | 19 |
| TACCGGAGGGCGACACTCGAGGTTGTGACCTCCCACAC | 2710 | 38 | 0.631578947 | 20 |
| TCGTCCCTGTCCGCGGCCGAGAGTATTGTACGCCCACA | 2711 | 38 | 0.631578947 | 21 |
| TCACGATCGATCGCGCGGAACTGGGTATGCTCCACCGC | 2712 | 38 | 0.631578947 | 22 |
| TTCTCGGAGGCATGCGGGCATTTGCATGGCTCCGTCCC | 2713 | 38 | 0.631578947 | 23 |
| TCTCTGCCGCTATGCGTTCACGCCATGGCAAAGGCGCC | 2714 | 38 | 0.631578947 | 24 |
| TGCATGATGGTCCGATGCTGCCTGCCTCGGCCTCATCC | 2715 | 38 | 0.631578947 | 25 |
| TGCGTCGACGCTTGCGCATACATGCAGAACGGGCGGTC | 2716 | 38 | 0.631578947 | 26 |
| TCAGCTCTGTCGAGGCCCAAGCCGTGGTCCTTGGTGAC | 2717 | 38 | 0.631578947 | 27 |
| TCTTCCGGTACGCGTCTCCTGGGTTTCGCCCGAACCGA | 2718 | 38 | 0.631578947 | 28 |
| TGGCGCACCGCGGCGGTATCTCGGGCCGAGCTCTGTAC | 2719 | 38 | 0.710526316 | 29 |
| TGCCAATTGAGCCGAACAGCGCCTGCGGGCCTGCCGGC | 2720 | 38 | 0.710526316 | 30 |
| TGTCACACATGCTCCCGGCACCTCGCCCGACGCACGGC | 2721 | 38 | 0.710526316 | 31 |
| TGCGGGCGAACGCTGCTTTCAGCGGCACCGGGCACCTC | 2722 | 38 | 0.710526316 | 32 |
| TTGCCGCACGCCGAGCCTTCTCTACGGGCCCGGGCGAA | 2723 | 38 | 0.710526316 | 33 |
| TGCCCGCCACGCTGCGTCCAGGGACGGGAAACGTCACC | 2724 | 38 | 0.710526316 | 34 |
| TACGGCGGCCGGACCTCTCCGCGTTACGCCTGCATGGC | 2725 | 38 | 0.710526316 | 35 |
| TGCTGCGAGAACCGCCTATCAGCCGGGCGCACGCTGCC | 2726 | 38 | 0.710526316 | 36 |
| TGTGCCCAGGCTTTATCGGCCGCCTGCCGCGCGTTGCC | 2727 | 38 | 0.710526316 | 37 |
| TGCATCGCGGTGCGGCCCGAGCCGTCGGCGGGCCTTCC | 2728 | 38 | 0.789473684 | 38 |
| TACGCACACCCGGCCCGGGAGCGACTCGGCCGCGTGGC | 2729 | 38 | 0.789473684 | 39 |
| TGGCCGACTCCGGACCGTCACCTCGCGCGGAGCGCGGC | 2730 | 38 | 0.789473684 | 40 |
| TGCGCGCCACCACGCGCGCGTGGCCTCCGCACGAGACC | 2731 | 38 | 0.789473684 | 41 |
| TGGCGGATGAGCCGCCCAGAAGGCGGCGAGGGCCGGCC | 2732 | 38 | 0.789473684 | 42 |
| TGCCAGGTCGACCGAGGCCGCGGGCCCGGGAAGACGGC | 2733 | 38 | 0.789473684 | 43 |
| TCGCCCGGCGCCGGGATGTGCGCCGCGGAGCCCGGAAA | 2734 | 38 | 0.789473684 | 44 |
| TCGAAGCCGCGGCTGGCGCGGACGTGCCCGGCGAGCAC | 2735 | 38 | 0.789473684 | 45 |
| TCCGTACGGGCCCAGGGTACGCCCGCGTGCCGGGCAGC | 2736 | 38 | 0.789473684 | 46 |
| TCCGCCTCTTATCTGTGGGCCGC | 2737 | 23 | 0.652173913 | 47 |
| TGCCAACCGTCGGGTCCATGCGA | 2738 | 23 | 0.652173913 | 48 |
| TTCGAGCGCACCCGCAACAAGCC | 2739 | 23 | 0.652173913 | 49 |
| TTCGCGCAGCAGGGTTGCGAACC | 2740 | 23 | 0.652173913 | 50 |
| TTTGGCCGGTGCGGGACAGGTAC | 2741 | 23 | 0.652173913 | 51 |
| TCGTTTGGCGATGGCCTCCTCCC | 2742 | 23 | 0.652173913 | 52 |
| TCTCGGCGAGCCGTCTACGTGTC | 2743 | 23 | 0.652173913 | 53 |
| TCGTGGTCTCGGGCATCAGACCC | 2744 | 23 | 0.652173913 | 54 |
| TGCCCAGTCCGTGTCTCTGCGCA | 2745 | 23 | 0.652173913 | 55 |
| TGCGTTTGTGCAATGGGCGGCGCAGTGGGCCGCGCATGTATCGCCA | 2746 | 53 | 0.622641509 | 56 |
| CAGATCA | | | | |
| TCGGAGGCCACGGTCGCCACAGCAACGTGGCTGTTTCACTATGGAT | 2747 | 53 | 0.622641509 | 57 |
| GTCGGGC | | | | |
| TCTCGGTCACGCACGGCGCAGCTCGGACAACCCGACACGCATTGCT | 2748 | 53 | 0.622641509 | 58 |
| ACTCCAA | | | | |
| TTGCTCCGTGGTATCGGTCCCGAGCCATATCAGGTTTGCCGCCGCGC | 2749 | 53 | 0.622641509 | 59 |
| AAGGGA | | | | |
| TTGGGTGTGGCGCCAACGGGAGTGCGGCCTGGGTACCTATTATTGC | 2750 | 68 | 0.632352941 | 60 |
| GGCCGTTGTGGTGGAGAGGACC | | | | |
| TCGCTGGCGTCGTACGCGGAGTGTGCAAGAGCTGGGTGGCGAAAGT | 2751 | 68 | 0.632352941 | 61 |
| CAAGCAGACCCTGGCTGCACCA | | | | |
| TCGGCTGTGGCAGGCCGGGAAGCTCCATGTACACGCTGCAAGGCGA | 2752 | 68 | 0.632352941 | 62 |
| AGCTACCCAGCCGTCAGGAACA | | | | |
| TTACCGGGCAGTGTCCTTTCTGCGCAGCAGGGTCGTACCGGACTACG | 2753 | 68 | 0.632352941 | 63 |
| CAGGAGGAAGGCTTCCGCGTC | | | | |
| TACAACGCGGATCAGGGCATCCATCCACAGCGTGCGCGAACGGCGG | 2754 | 68 | 0.632352941 | 64 |
| TGTCCCGAGATGGGTGGTATGC | | | | |
| TCCTCTCGCCTGAATCGGACTGGACAGCTTCGTGGGATGGCTCGAAG | 2755 | 68 | 0.632352941 | 65 |
| AGCCTCCGGAGGCGGTCTACC | | | | |
| TTGCCGACTGATACTGCGTCCTTACGCCCGATTGCGTTACAAGGGTG | 2756 | 68 | 0.632352941 | 66 |
| CAAGCGGACGCCCGCGCAGCC | | | | |
| TCCCGGAGCGAAACCGGCCAACGAAGCGAAAGGGTGGCCCTGCAGT | 2757 | 68 | 0.632352941 | 67 |
| GGATATGTGGCGGCTGTCTTCC | | | | |
| TCCAGCAAGAGGCAACCCACCCACGCGAAGCCACCACTTGCGCCGA | 2758 | 68 | 0.632352941 | 68 |
| CGACGGAACCTCGCTCGATTTC | | | | |
| TCCGAGGAGGACAGAGCCAAGGACAGCCCTTCCTCAATCTACTCAC | 2759 | 83 | 0.626506024 | 69 |
| GATCGACGTGCGCGGCCTTGAAGCGGCGAGGTCACGC | | | | |
| TCCCGCCTTCACACCCTCGAGATACTGCGCGCTCAGCCTTCACACCT | 2760 | 83 | 0.626506024 | 70 |
| ATCGCGCACAGTCGGACCGGGCTGTACTGGATGGGA | | | | |
| TTGCAGCCAATTGTGGCAACACCGGAAGCCAAGGCACAGGATGCCG | 2761 | 83 | 0.626506024 | 71 |
| ATCGCCGGTGGGCGCGCCACTTGCTGGCCAAGCTATC | | | | |
| TTGGCCAAAGACACCACGAGAAATGCCCAATCAGGGTGGCAGGGAC | 2762 | 83 | 0.626506024 | 72 |
| TGCCACGAAGCGGACTGCGACGAAGGCGCGCACAGCC | | | | |
| TTACTGAGTGGCCCGTACGCGCAGGGCCGTCGGCAGAACTCAGTGT | 2763 | 83 | 0.626506024 | 73 |
| CGACCGACGGCAGATGGTCCGTCTTCTGGTCATCCCA | | | | |
| TCGCGGCCTGCGGTTCGGTACGTTGCGTTTCAAACCGGTCTTCCTGC | 2764 | 83 | 0.626506024 | 74 |
| ACGTCTGCTTGCGGAGCTTCGAAAGTCGCCGGAGCC | | | | |
| TGGCGCCTGAGCCGTTTGAAAGAGGCACTCGTGCCATATTGCCTCGA | 2765 | 83 | 0.626506024 | 75 |
| CGCCTCTGGCAACGCCACTCCGGTGTCCCGTGTGGA | | | | |
| TCATACGCGGCAATCGCGTCCTTCTGTACGGACCCACTACGGTTGCC | 2766 | 83 | 0.626506024 | 76 |
| GCTATGTCAGAGACGGCGGCGTTGCACAGCCGTGCC | | | | |
| TCCCACTACCGTCAGACTCGCTCAGAACAGACCAGATCACGGCGGC | 2767 | 83 | 0.626506024 | 77 |
| GGGATCCGCCTTGTCAAGGAGAGCGGAGCGTACACCC | | | | |
| TGGGCGACTTACGATTGGAGCATTCTCCTCGGCTTTGTTGGCTCAGC | 2768 | 83 | 0.626506024 | 78 |
| GCGACCCGCTGGGAGGAGGAGGACACCTGGGAGCGA | | | | |
| ACGATGATGGTGATGATGGTGTGC | 2769 | 24 | 0.5 | 79 |
| TAAGTCAAATGAGACTTT | 2770 | 18 | 0.28 | 80 |
| TTAAGTGAGCTGCTT | 2771 | 15 | 0.4 | 81 |
| CAGACGGTGGCGCACTCATGCCACGCTT | 2772 | 28 | 0.64 | 82 |
| TCTTGTGAATGGAATTGAGGAGCTT | 2773 | 25 | 0.4 | 83 |
| GGAGAGAGGCGGGCTCTCTTTCCTT | 2774 | 25 | 0.6 | 84 |
| CGGGCCACCGCCCTT | 2775 | 15 | 0.8 | 85 |
| GCAAGGTGTTTGTGCACCTTACCTT | 2776 | 25 | 0.48 | 86 |
| TTTACACTAGATGGTGCTGT | 2777 | 20 | 0.4 | 87 |
| TCTGCACAAGAGATATTCTGTTCTCCATGT | 2778 | 30 | 0.4 | 88 |
| TAAAGGATCACATATAGGTCGTGGT | 2779 | 25 | 0.4 | 89 |
| GCCGGCGGAAGCCGGCTGGT | 2780 | 20 | 0.8 | 90 |
| TCTGCCCTCCTCTTGGGT | 2781 | 18 | 0.61 | 91 |
| AAAGGGTTGCACTTTGCTGATACGTGGGGT | 2782 | 30 | 0.5 | 92 |
| GCCGGGGTATGGGCACACGCCCCGCGGGGT | 2783 | 30 | 0.8 | 93 |
| GTGATCCAAGTGCTCGACACTCCCACGGGT | 2784 | 30 | 0.6 | 94 |
| GGGTGCGGCGCAAGGGCCGCCTCGT | 2785 | 25 | 0.8 | 95 |
| TTGCCCTATCGGCGT | 2786 | 15 | 0.6 | 96 |
| CCCCTGCGCGGACCGCGCCTTCCGT | 2787 | 25 | 0.8 | 97 |
| GCGCCGTTGCGGCCGCGCCCGT | 2788 | 22 | 0.86 | 98 |
| TGTGGGACGTTACATTGAGTATTGAGCGCGCACGT | 2789 | 35 | 0.51 | 99 |
| ATGGGGCCTTAACGACCCGCGCCCCGCCTCTCAGT | 2790 | 35 | 0.69 | 100 |
| GGAGGGGAGTACGCAGCGCCCCAGT | 2791 | 25 | 0.72 | 101 |
| ACCTTTGGCCGTTCT | 2792 | 15 | 0.53 | 102 |
| CATAGCTGCT | 2793 | 10 | 0.5 | 103 |
| CACTATTACAGGAAATTGAGTAACTGGGCT | 2794 | 30 | 0.4 | 104 |
| GCCGGGGCATGGGCT | 2795 | 15 | 0.8 | 105 |
| TGCCGCACGGCGGCT | 2796 | 15 | 0.8 | 106 |
| GTTACACAAGTAGCT | 2797 | 15 | 0.4 | 107 |
| GGGCCTAGCT | 2798 | 10 | 0.7 | 108 |
| AGCTCAGATTATAGTGAGCT | 2799 | 20 | 0.4 | 109 |
| GTCGCGCTGTTCCGCGAGCT | 2800 | 20 | 0.7 | 110 |
| TAGATCAATTTCCGAGATCACTGTCATCTCAAGCT | 2801 | 35 | 0.4 | 111 |
| ACGACCGAGGGTCCT | 2802 | 15 | 0.67 | 112 |
| AATTTCAAGATCCTGCCT | 2803 | 18 | 0.39 | 113 |
| GGCCTGGACGCCAGGCCT | 2804 | 18 | 0.78 | 114 |
| GTCACCTACGCGCCT | 2805 | 15 | 0.67 | 115 |
| TCGGCCGGTCTTCCGCCT | 2806 | 18 | 0.72 | 116 |
| CCGCCGGCTCATCGAACCGCCT | 2807 | 22 | 0.73 | 117 |
| GCGAACCGACGTCACGGCTCGGGGTACTGAGGACT | 2808 | 35 | 0.66 | 118 |
| GGTACTACGTAAGCAGATAAGGTAAACACT | 2809 | 30 | 0.4 | 119 |
| ATACTGCCGGCCGAGAGTAAAGGACAGGTCATTAGGGTAT | 2810 | 40 | 0.5 | 120 |
| CTTGGACGGAAATCGCCTAT | 2811 | 20 | 0.5 | 121 |
| TTGAGCGATGCATAT | 2812 | 15 | 0.4 | 122 |
| GGTCCAGGCAAGACGCTGAT | 2813 | 20 | 0.6 | 123 |
| CGAGCTTACCCGTGGGGAAGCAAGGGAT | 2814 | 28 | 0.61 | 124 |
| GGACCAGTGTCCGTGGCGAGAT | 2815 | 22 | 0.64 | 125 |
| AGTAACTACGCAGAT | 2816 | 15 | 0.4 | 126 |
| GTTTCACATGGCCTGGACTCAT | 2817 | 22 | 0.5 | 127 |
| CTAGCGTGGCAGGTCTGCAT | 2818 | 20 | 0.6 | 128 |
| TTGCCCCATTGGCAT | 2819 | 15 | 0.53 | 129 |
| TGTGCCCGAGGGAGAATCGAACACATGAAT | 2820 | 30 | 0.5 | 130 |
| GCTACGGGTTCGCCTGAGCAAT | 2821 | 22 | 0.59 | 131 |
| AGGATCATCGATTTG | 2822 | 15 | 0.4 | 132 |
| ACAGCTGGGCAGGTG | 2823 | 15 | 0.67 | 133 |
| CATCGGTGGTCACTTGGCGGAGCTCGTG | 2824 | 28 | 0.64 | 134 |
| AGAGCGGCGGCCCGGCCGTG | 2825 | 20 | 0.85 | 135 |
| AATCGGCGAACGAAACCCGAAGCGCACGTG | 2826 | 30 | 0.6 | 136 |
| GCCCTGTCCGTAGTG | 2827 | 15 | 0.67 | 137 |
| CATTGCATACCTATAGTG | 2828 | 18 | 0.39 | 138 |
| GGCCGCAGACCGAAGCGGTGCAGTG | 2829 | 25 | 0.72 | 139 |
| GCGGCCGTCCCGGGGCTG | 2830 | 18 | 0.89 | 140 |
| GCCTAGGCTG | 2831 | 10 | 0.7 | 141 |
| CCCCAACCGCCGGCGGCCGATG | 2832 | 22 | 0.82 | 142 |
| AGCCTGCCCCGGGCCGCGGTGG | 2833 | 22 | 0.86 | 143 |
| TGAGCAAGATTCTCTCTAATTTCTTCCTGG | 2834 | 30 | 0.4 | 144 |
| CTGACACTGG | 2835 | 10 | 0.6 | 145 |
| AAGACACCGCCTGGGCCCCGATTGATATGG | 2836 | 30 | 0.6 | 146 |
| GGCCGGACGGGGCGGCGGGG | 2837 | 20 | 0.95 | 147 |
| CACCCGGCCCGCCGCTCCCGGGCCCGGGGCCGGGG | 2838 | 35 | 0.94 | 148 |
| CACCGGCGGG | 2839 | 10 | 0.9 | 149 |
| TGGTACGGCCGGATTCCGGG | 2840 | 20 | 0.7 | 150 |
| CCGGGTGGCGCCGGG | 2841 | 15 | 0.93 | 151 |
| TCGGCGGCCGGGCTCAGGCGCCGGG | 2842 | 25 | 0.88 | 152 |
| GGCGAGGCAGCCCCAAGGCCCCGGG | 2843 | 25 | 0.84 | 153 |
| GTTCGCGGGTGGGCGTTACGGG | 2844 | 22 | 0.73 | 154 |
| CTACCCTCCTCCGCGACGGG | 2845 | 20 | 0.75 | 155 |
| GTGAAGTCGGCGTGACCGAGGGCACGGG | 2846 | 28 | 0.71 | 156 |
| CCGGCAAGGG | 2847 | 10 | 0.8 | 157 |
| TGGTAGTTTCCGGTTTCGGCCTCGG | 2848 | 25 | 0.6 | 158 |
| TCGGACACCCTAGACCTCGG | 2849 | 20 | 0.65 | 159 |
| GGCGCGGGCGGGCCGGGATCGG | 2850 | 22 | 0.91 | 160 |
| GCCCCACGGGCCGAGTGCGG | 2851 | 20 | 0.85 | 161 |
| AGCTGCAGCCCGCCTCCACGACGGGCGG | 2852 | 28 | 0.79 | 162 |
| CCCGCGCCGCCAGCCCTAGGGTGGCCGCTCGGCGG | 2853 | 35 | 0.86 | 163 |
| GCGGGGCCCGGCGAGTTTGGCAGCGCGACGAGCCTCGCGG | 2854 | 40 | 0.8 | 164 |
| GCCGCCCGCCTCCGCGGCGCGG | 2855 | 22 | 0.95 | 165 |
| GCCGTAACCTCCGCGCGG | 2856 | 18 | 0.78 | 166 |
| GCGCCGGCGCGCCAGGCGCGGCCCGGCCGTGCCCGCGCGG | 2857 | 40 | 0.95 | 167 |
| CGCTGGGGCCTCCCGTCGGGGCCTGGCACGCGCGG | 2858 | 35 | 0.86 | 168 |
| GCCAGCGCGG | 2859 | 10 | 0.9 | 169 |
| ATTGTTCGCAAGCGG | 2860 | 15 | 0.53 | 170 |
| GGGGCCCGGCCTCAGGGGCCGG | 2861 | 22 | 0.91 | 171 |
| CCTTTAGAAGGCCAGGCCGG | 2862 | 20 | 0.65 | 172 |
| GCCCCGCAGCGGCACGGCCTGTGGCGCCGG | 2863 | 30 | 0.87 | 173 |
| TGTCCGCCGG | 2864 | 10 | 0.8 | 174 |
| CTAGCTTCGATCGCTACGGAGCCGG | 2865 | 25 | 0.64 | 175 |
| TCGACGGTATCGGCCCAGCCTGCGAGCCGG | 2866 | 30 | 0.73 | 176 |
| ACGGCGCGCAACAACGGCCACCTCCCGG | 2867 | 28 | 0.75 | 177 |
| GTACGAGCCGGGCCGCCGGGGAAGCCGTTCCCCGG | 2868 | 35 | 0.8 | 178 |
| CGGACGTGCTACCGG | 2869 | 15 | 0.73 | 179 |
| ATGGCAGTAGGTGTCAATACTACGG | 2870 | 25 | 0.48 | 180 |
| CGGAGGACGG | 2871 | 10 | 0.8 | 181 |
| TGCGGGCGGCCGTGTATAGG | 2872 | 20 | 0.7 | 182 |
| TGCGGGTCACCGAGG | 2873 | 15 | 0.73 | 183 |
| GCCACGAGGCTCAGG | 2874 | 15 | 0.73 | 184 |
| TTAAAGGGGACAATAACGCTTAAGG | 2875 | 25 | 0.4 | 185 |
| GAAACTTAAAGATGATAAGG | 2876 | 20 | 0.3 | 186 |
| GGAGACCGAGCGTGTGCGACGCTCCTGTCG | 2877 | 30 | 0.7 | 187 |
| CGCTCCGCGTCCCAATAGGTCG | 2878 | 22 | 0.68 | 188 |
| CCTTGTGGGCTGCGCCGAGCAGTCG | 2879 | 25 | 0.72 | 189 |
| GCCGCCCTGGCCTCG | 2880 | 15 | 0.87 | 190 |
| GGGCCAAGCCGCAGGTACCGGAGAACCCGGTGGCG | 2881 | 35 | 0.74 | 191 |
| AGCATATTTCACCTATTGGACCTGGGCG | 2882 | 28 | 0.5 | 192 |
| GCGCGCGGGCATTGGGCGCGGGCCGGCGCGGGCTGGGGCG | 2883 | 40 | 0.9 | 193 |
| CCGAGCGGCCACGAGGATCGGGGCG | 2884 | 25 | 0.8 | 194 |
| GCCCGCTCAGCCTCCCCGGCCCGGGGCG | 2885 | 28 | 0.89 | 195 |
| CCGGGGACGCCACGCGCGGTGCGCGGCG | 2886 | 28 | 0.89 | 196 |
| TACCCGGCCGCTCCGGCG | 2887 | 18 | 0.83 | 197 |
| GCTGGGCGACGGCCGGCGCG | 2888 | 20 | 0.9 | 198 |
| CCTACCACCCTCCGCAGCGCGCGCG | 2889 | 25 | 0.8 | 199 |
| AAGTAGGGCAGGGGACATCCGGTCCCGCTAGCGCG | 2890 | 35 | 0.69 | 200 |
| CGCCGCCAGCGCGCGACGCGGTGCCGGCCGCCGCG | 2891 | 35 | 0.91 | 20 |
| GGGGCGGCGCCGGCGGCCGGCTCCCGCG | 2892 | 28 | 0.96 | 202 |
| GCGTCGCCCGCCGGCAGCGGACGCG | 2893 | 25 | 0.88 | 203 |
| CGAAGGAGGGGTTCCTCGCGGAGCG | 2894 | 25 | 0.72 | 204 |
| CGAGCGAGCG | 2895 | 10 | 0.8 | 205 |
| AATCTTGCATTTGTCTTAGCAAGATCTCCG | 2896 | 30 | 0.4 | 206 |
| CGTCGCCCGGACGGGGCCCGGCCCACGCGCGAGTCTGCCG | 2897 | 40 | 0.85 | 207 |
| ATCGCGCGCTGGTGGCCG | 2898 | 18 | 0.78 | 208 |
| CCCTCGTACAGCGCGCCG | 2899 | 18 | 0.78 | 209 |
| GCACGGGGCACGTCCCGGGACGTAGCCG | 2900 | 28 | 0.79 | 210 |
| CCCGGCGACCAGCCG | 2901 | 15 | 0.87 | 211 |
| GTGCGCCGGGCCCCGCGCCCCAGCCTCCCG | 2902 | 30 | 0.9 | 212 |
| CGCACGCGGGGCCCG | 2903 | 15 | 0.93 | 213 |
| TTGCGGTGGTGTCGGGTGCGGCCCG | 2904 | 25 | 0.76 | 214 |
| CATCAGCGGAGCTCCCCG | 2905 | 18 | 0.72 | 215 |
| GAGGGCGGTTAGAGTGCCATTACCG | 2906 | 25 | 0.6 | 216 |
| GAAAGTCGCTGCGCGCGGACCG | 2907 | 22 | 0.73 | 217 |
| CCCCGGGCCGGACCG | 2908 | 15 | 0.93 | 218 |
| CGATCTTCCCGAACACCG | 2909 | 18 | 0.61 | 219 |
| TGCACGGGTACACTGAAGCCCTACG | 2910 | 25 | 0.6 | 220 |
| ATATCTCGTTGGTATTTAATATGATACG | 2911 | 28 | 0.29 | 221 |
| GGGCGTCGGACCCATCGACG | 2912 | 20 | 0.75 | 222 |
| GACACGCGCGGCACG | 2913 | 15 | 0.8 | 223 |
| CTGAGGGGCCGTGTTGCGACCCACG | 2914 | 25 | 0.72 | 224 |
| TCCTAACAGCGGACGACCCACG | 2915 | 22 | 0.64 | 225 |
| TCCCCTCCCGGCACGCCGCGCGGCTCGCCAGAACG | 2916 | 35 | 0.8 | 226 |
| TTACCTATTACCAAGGGCTACATCTTAG | 2917 | 28 | 0.39 | 227 |
| TAGCACTCTATCGCATAAGTCATTCTAG | 2918 | 28 | 0.39 | 228 |
| GCAGTGCTAG | 2919 | 10 | 0.6 | 229 |
| GCGCGAACCTGGGATCGCCATGCATGATAG | 2920 | 30 | 0.6 | 230 |
| GCCGACTCAGTGCTGCTCTGAG | 2921 | 22 | 0.64 | 231 |
| GGAGAGATCACGCTCGATACGAGGGGAG | 2922 | 28 | 0.61 | 232 |
| ATGGCGGACTCAGCGCGCCGAAGAACGGAG | 2923 | 30 | 0.67 | 233 |
| ACTTCACATCCAGTGACGAG | 2924 | 20 | 0.5 | 234 |
| AAGCGAGTCAGAAGAGAGAG | 2925 | 20 | 0.5 | 235 |
| CAGCGCCCCGCCGGCGTACCGCCCTAGCAG | 2926 | 30 | 0.8 | 236 |
| GCCTTACTCGACCGCCACGACCTCGTCCAG | 2927 | 30 | 0.67 | 237 |
| CCTCGGATGGGGCCGCGGCTACGGGTACAG | 2928 | 30 | 0.73 | 238 |
| AATTCTGATGTAAAG | 2929 | 15 | 0.27 | 239 |
| TGATAGGTAAGGTGTAATTACTTTC | 2930 | 25 | 0.32 | 240 |
| GTACGGCTTC | 2931 | 10 | 0.6 | 241 |
| TGGGGTACTTATGTCGTC | 2932 | 18 | 0.5 | 242 |
| CTATCCGGTCCGAGCGTC | 2933 | 18 | 0.67 | 243 |
| CTGAGCGGCGAAGGCATCCCGGCCTCCGTC | 2934 | 30 | 0.73 | 244 |
| GCTGTGGGTCGCAGTCACGCGGGCCGTC | 2935 | 28 | 0.75 | 245 |
| GCACACAACGACGTC | 2936 | 15 | 0.6 | 246 |
| TAGGGAAGAGTCGAATATATCTCTC | 2937 | 25 | 0.4 | 247 |
| AACCCGCAGAGGGACGGGTCGTTCGCCCTC | 2938 | 30 | 0.7 | 248 |
| ACTACGGGTGGGAACCTC | 2939 | 18 | 0.61 | 249 |
| CTGTGCATCGCACTC | 2940 | 15 | 0.6 | 250 |
| TCAAACATGAATTCTTCACGTTGTTAAAGATTATC | 2941 | 35 | 0.29 | 251 |
| GGTCCATTGGCACTAGGGGCGTTCAGTATCATATC | 2942 | 35 | 0.51 | 252 |
| TAACTGCTCTATATACGAGATTATCAAATC | 2943 | 30 | 0.3 | 253 |
| CGATACGGCGCCCACGGCGGTGCATTGC | 2944 | 28 | 0.71 | 254 |
| TCCCTGTCCGCCACCTGGCGCTGCTGGCGTGGACATGTGC | 2945 | 40 | 0.7 | 255 |
| CCGGCGCAGGGCGGACCGACGAGAGCGTGC | 2946 | 30 | 0.8 | 256 |
| ACTCTATCGATTATCTGC | 2947 | 18 | 0.39 | 257 |
| ACTGCCGGGGCCGGCGCCGTCGCAGCGTCCGATGC | 2948 | 35 | 0.8 | 258 |
| GAAGAATAAACGTTGGATCTCACATCATGC | 2949 | 30 | 0.4 | 259 |
| AAACAGACATTGTGCCTGTGCATGC | 2950 | 25 | 0.48 | 260 |
| CGCGCTCCAGCGGTCGGGGCCTGGC | 2951 | 25 | 0.84 | 261 |
| TGGAAATGCCGTGGCGTGGGGC | 2952 | 22 | 0.68 | 262 |
| ATGCGCGCGCTGTCGGGC | 2953 | 18 | 0.78 | 263 |
| CGGGCGGCGGGAGCGGGC | 2954 | 18 | 0.94 | 264 |
| GGCAACGGGACGTCCCCGGGGCGGC | 2955 | 25 | 0.84 | 265 |
| CCAGTCGGCCCTGCTCCGGC | 2956 | 20 | 0.8 | 266 |
| ACGCAGGCCTTGCCTCCACGACGGC | 2957 | 25 | 0.72 | 267 |
| CGTGCCCGCAGCCGGTTGGAGTGTGAGCGGGAGGC | 2958 | 35 | 0.74 | 268 |
| GCGGTGGGCGGAGGC | 2959 | 15 | 0.87 | 269 |
| AGCGGCTTCGAATCTCAGGC | 2960 | 20 | 0.6 | 270 |
| CGACCGGTGCGGGCCCTCGTCGAGGAGCAAGGGTGCAGGC | 2961 | 40 | 0.75 | 271 |
| AGGAAACGGCGACCTGAGGTTTCGC | 2962 | 25 | 0.6 | 272 |
| TGGACCGCCACAGGCTTGGCCCTAGCTCGC | 2963 | 30 | 0.7 | 273 |
| GCCCCGGGCGACTGGCACTCGC | 2964 | 22 | 0.82 | 274 |
| CGAAGTGGTGTAGCTGACATCGCGC | 2965 | 25 | 0.6 | 275 |
| CCCGGGTGGTGGCCGCGCCGGTCAGCGCGC | 2966 | 30 | 0.87 | 276 |
| CGAGGTAGAGGCGAGGAGTAGACGCCGCGC | 2967 | 30 | 0.7 | 277 |
| GATCTAAGAACTGTCTCCGC | 2968 | 20 | 0.5 | 278 |
| TCGTGTTCAATCCGC | 2969 | 15 | 0.53 | 279 |
| GGACATTCTTGCCGC | 2970 | 15 | 0.6 | 280 |
| GGTCCTGGTGACGACGGGGTGAGAGCGAACTTAAGGCCGC | 2971 | 40 | 0.65 | 281 |
| AGCCCGCGCGTTACACGC | 2972 | 18 | 0.72 | 282 |
| GAACACTCCGGCCGTAGC | 2973 | 18 | 0.67 | 283 |
| CCGGTCGTCCGTTCAGAGACCATGCGGAGC | 2974 | 30 | 0.67 | 284 |
| GCGCCCAGAAGTGGGGAAGCCGCTGCCAAGAGAGC | 2975 | 35 | 0.69 | 285 |
| CTCGCTCTAAGATTTAGCCGCTGAAAGAGC | 2976 | 30 | 0.5 | 286 |
| ATGTACGGGCCGTCC | 2977 | 15 | 0.67 | 287 |
| ACGCCATGGAGGGATAGTCC | 2978 | 20 | 0.6 | 288 |
| GTCGCTGATTTCGGTGCGAGCCTCC | 2979 | 25 | 0.64 | 289 |
| CTGCCCCTGAGGGACGATCC | 2980 | 20 | 0.7 | 290 |
| GCACCGAAGCGCGGTCCAATGGACATCC | 2981 | 28 | 0.64 | 291 |
| TCCAAGGCCACCCCGCGGGTACCGGAATCC | 2982 | 30 | 0.7 | 292 |
| CGCGCACGCCGGGGTGCC | 2983 | 18 | 0.89 | 293 |
| CCGCGTGGGGTGGCGGTGCCCCGGTGCC | 2984 | 28 | 0.86 | 294 |
| CTCACGGGTCCCCGAGCCCGCTGCC | 2985 | 25 | 0.8 | 295 |
| CGCCCGGCCCGTTGAACGGGTCACTGGCATCGGCC | 2986 | 35 | 0.74 | 296 |
| GCGCACCGGAGCGGAGGCAGGGCCGGCC | 2987 | 28 | 0.86 | 297 |
| CCCGGGCGCCCCGCGAGGCCCGGCC | 2988 | 25 | 0.96 | 298 |
| GCCGGCCGCACCGGGCCGCGACGCCCGGCC | 2989 | 30 | 0.93 | 299 |
| GGAAGCGGAGACTCTATGCTTCGCC | 2990 | 25 | 0.6 | 300 |
| GGCCCAGGCCCGGGCTCCCAGGCCGGCGCC | 2991 | 30 | 0.9 | 301 |
| CCCCGTCGTACGGGCCGCTCCCGCCGCC | 2992 | 28 | 0.86 | 302 |
| CCCGCGCGAGGAGGAGCC | 2993 | 18 | 0.83 | 303 |
| ATGATCCTGACGACGGAGACCGCCGTCGTCGACAAGCC | 2994 | 38 | 0.63 | 304 |
| CCAGGTGGTACCATATGGTCCC | 2995 | 22 | 0.59 | 305 |
| AAAGGGGACACCGGGGTCCC | 2996 | 20 | 0.7 | 306 |
| CTCCGCCCTAGTGTAGTCCC | 2997 | 20 | 0.65 | 307 |
| GGCGCCGAAGGTCCCAGGTGGACCGGGCCC | 2998 | 30 | 0.8 | 308 |
| CGTGGCCGTAGGTCCGGTTCGGCCC | 2999 | 25 | 0.76 | 309 |
| GTGGTGACGGAGGCTCCCACGGCCC | 3000 | 25 | 0.76 | 310 |
| CGGGCCGCCGATGTGCGCCC | 3001 | 20 | 0.85 | 311 |
| GCTCCCCAGTGGCCGCCC | 3002 | 18 | 0.83 | 312 |
| CCTAGGCGGGTCGGAGGGCCCC | 3003 | 22 | 0.82 | 313 |
| AGGTCGCCTGTGCGCGCCCC | 3004 | 20 | 0.8 | 314 |
| AGGATGGGTAGAATAACGACCC | 3005 | 22 | 0.5 | 315 |
| CGCATGTCCCGCCTCTACCCAGGAAGATGGCACCC | 3006 | 35 | 0.66 | 316 |
| CGACAACAAAGATTATGTCACTTCTCTACC | 3007 | 30 | 0.4 | 317 |
| AGCGGGGACC | 3008 | 10 | 0.8 | 318 |
| AGGTGCACACAGTTGCGACC | 3009 | 20 | 0.6 | 319 |
| AGGTCACTCCCGACC | 3010 | 15 | 0.67 | 320 |
| CTGCGGCACC | 3011 | 10 | 0.8 | 321 |
| CCTCCTCACCTTTGCCAGAGGGACTTCGCTTGGGAACACC | 3012 | 40 | 0.6 | 322 |
| CAAGTTGTGCCCCTAGTGAGCTTGGATTAC | 3013 | 30 | 0.5 | 323 |
| TTGCTCTCTGCCATGTAC | 3014 | 18 | 0.5 | 324 |
| GGCAATTAACCATAC | 3015 | 15 | 0.4 | 325 |
| ATCCCGCGAGTGACCGCGAC | 3016 | 20 | 0.7 | 326 |
| TGTGGCCCGCGCTCCGGCAC | 3017 | 20 | 0.8 | 327 |
| GCGCCACAGGCGCAC | 3018 | 15 | 0.8 | 328 |
| CTCGAGTCGGACCAC | 3019 | 15 | 0.67 | 329 |
| GGTAACGTAATACAAGGAAACATGAGACAC | 3020 | 30 | 0.4 | 330 |
| TGCGTATTCCTAGATAGCTCCACAC | 3021 | 25 | 0.48 | 331 |
| ACCGTTACCGCCGAACGACCTCGCGGGCTCAACAC | 3022 | 35 | 0.66 | 332 |
| CGCAGTCACAGGGAGTCGCGACCGTTGCTGCATTA | 3023 | 35 | 0.6 | 333 |
| GGACGCGGACGCCGGGTA | 3024 | 18 | 0.78 | 334 |
| CCCCTAGGTAGCCAGAAGGGCGAAACCACGTGCTA | 3025 | 35 | 0.6 | 335 |
| ACGCCCTCGAGCACCCAGGCGACCCCTA | 3026 | 28 | 0.71 | 336 |
| TCTGCAACGATGGAATCAACACACTATA | 3027 | 28 | 0.39 | 337 |
| GTATCGGGGTAATGCATATA | 3028 | 20 | 0.4 | 338 |
| TTCTCAAAGAGACTTTGTTAAGGGTACCGCTGATA | 3029 | 35 | 0.4 | 339 |
| GTCAGCTCTATATTTCCTGACTTGA | 3030 | 25 | 0.4 | 340 |
| TTCTACGCCGGTTTCTGA | 3031 | 18 | 0.5 | 341 |
| TTGGAGTTTGCTCTGTGTATGA | 3032 | 22 | 0.41 | 342 |
| GACCGCCGTAGAGTACAATGACTCACGCGGCTCGA | 3033 | 35 | 0.6 | 343 |
| CGGCGGATCGCGCCCCTGGCGCGGGGCCGA | 3034 | 30 | 0.87 | 344 |
| TGCACGCGGGGCCGA | 3035 | 15 | 0.8 | 345 |
| GTCGGCCTGCACGCCGGCCACGCCCGGGGCGCCGA | 3036 | 35 | 0.86 | 346 |
| AAGCCCTGCGCAGCGGTCCGTCCGCCGA | 3037 | 28 | 0.75 | 347 |
| GCCTGGCCGGGCCTCACCGA | 3038 | 20 | 0.8 | 348 |
| GGGTCTGATGCCCGAGACCACGA | 3039 | 23 | 0.65 | 349 |
| AGGAACATCAAGTGCTAGAAGA | 3040 | 22 | 0.41 | 350 |
| CTTAGGGTCTCAGTAACCCACTTCA | 3041 | 25 | 0.48 | 351 |
| GCCTCGCGGGCGGCCCGGGTCA | 3042 | 22 | 0.86 | 352 |
| ACGGGACATTTGTTATCTCA | 3043 | 20 | 0.4 | 353 |
| TGTAGCTATGGATCA | 3044 | 15 | 0.4 | 354 |
| GGATGGCTAATTATCTGTTTACCCGTCACAAATCA | 3045 | 35 | 0.4 | 355 |
| CCAGGACAAGGAACGATTGAATGGTGCA | 3046 | 28 | 0.5 | 356 |
| GCCCACCCGTCCGGCGGACGGCCTCCTGCA | 3047 | 30 | 0.8 | 357 |
| GGATGAGGCCGAGGCAGGCAGCATCGGACCATCATGCA | 3048 | 38 | 0.63 | 358 |
| TTTCCGGCGCGCAGATCGGGCA | 3049 | 22 | 0.68 | 359 |
| CGCCCCGCGGGGCGCTCGCA | 3050 | 20 | 0.9 | 360 |
| GAGCCCAGCATAGCA | 3051 | 15 | 0.6 | 361 |
| GGCCTGTGGCTACGGGCGGCGGGCAGCA | 3052 | 28 | 0.79 | 362 |
| ACTATACGGACCGAGTCCGCCA | 3053 | 22 | 0.59 | 363 |
| ACGCGCGTTACCCCA | 3054 | 15 | 0.67 | 364 |
| TGTTGACTTAACGCCATGACCTGGTGCTGTCACCA | 3055 | 35 | 0.51 | 365 |
| AGTTCGCTTCCATAGCATTTAACCA | 3056 | 25 | 0.4 | 366 |
| TATCTAACAATGAAGTTGCACA | 3057 | 22 | 0.32 | 367 |
| AGGTGGCTACAATTGCCACA | 3058 | 20 | 0.5 | 368 |
| ATGCGTCCACGCGCCCAGGCTGTAA | 3059 | 25 | 0.64 | 369 |
| AGTCATACCACGCACATCATAA | 3060 | 22 | 0.41 | 370 |
| TACTTCTTGAATGTAATTACCAAATACGTTAGCTATGGAA | 3061 | 40 | 0.3 | 371 |
| CGCCGCGGGCTGGGCCCGGGCGCGGGCGGGCGGAA | 3062 | 35 | 0.91 | 372 |
| CCGGAGGGCTCCGACCGGAA | 3063 | 20 | 0.75 | 373 |
| ATCAAGCGACGCACGCGTGCCTCCAGAA | 3064 | 28 | 0.61 | 374 |
| CGGTCCGCACCGCAAGAA | 3065 | 18 | 0.67 | 375 |
| GCGGTATCACCTACGACATCAA | 3066 | 22 | 0.5 | 376 |
| TTCGCCCGGGCCCGTAGAGAAGGCTCGGCGTGCGGCAA | 3067 | 38 | 0.71 | 377 |
| GGGCCGGTGGGCCAA | 3068 | 15 | 0.8 | 378 |
| GCCCCTACAA | 3069 | 10 | 0.6 | 379 |
| GTTGGTGTGCACTACGACAA | 3070 | 20 | 0.5 | 380 |
| CAATGTTCGTATAACCGTCCCTAGTGTGTCTGTTACTAAA | 3071 | 40 | 0.4 | 381 |
| AGTAGCTGTACCCAACTAAA | 3072 | 20 | 0.4 | 382 |
| CGCGAGGACAACCTTTCCAATTCGGAAA | 3073 | 28 | 0.5 | 383 |
| GAAGCGGAAA | 3074 | 10 | 0.5 | 384 |

TABLE 38
Exemplary 3' RTT sequences

| | | | | RTT |
|---|---|---|---|---|
| | SEQ ID | RTT | RTT GC | Pairing |
| Sequence | NO: | length | content | NO: |
| ATGATCCTGACGACGGAGACCGCCGTCGTCGACAAGCC | 3075 | 38 | 0.63 | 1 |
| GGTAATAGCATACAGTTGCCGGTTGCAAATCTTGGAAA | 3076 | 38 | 0.421052632 | 2 |
| TGTAATCCGAGTACGCTTCGTGATAAACCGGAACAATA | 3077 | 38 | 0.421052632 | 3 |
| GATAAGTATTGATATGGAACGCATAGGGTGGTGCGATA | 3078 | 38 | 0.421052632 | 4 |
| TGCGGTGAATAGGTTGAAAGAAGGATACTGTAGACGAA | 3079 | 38 | 0.421052632 | 5 |
| GTGGAAATCATCCGCCATGAAGTATTCACACCATAACA | 3080 | 38 | 0.421052632 | 6 |
| TGGATCGGCAATATGTTTGCATGGGCTTCGTATACATA | 3081 | 38 | 0.421052632 | 7 |
| GGTAATCGCAAATGCCAAATACCATGTAGACACGGTAA | 3082 | 38 | 0.421052632 | 8 |
| TTCTGTTGGAGTGCCCGTTGGTATATGTACCTTGTATA | 3083 | 38 | 0.421052632 | 9 |
| TCCCTCTGGACGTGTAAATTTCCAAGTATACGCAGTAA | 3084 | 38 | 0.421052632 | 10 |
| GGCGGTGCCATATCCTGACCGTATACCCTGTACATACA | 3085 | 38 | 0.526315789 | 11 |
| TGTCCGTGCATTCGAGTACCTGTACTTGTCGAGGGTGA | 3086 | 38 | 0.526315789 | 12 |
| GCTCCAGAATACGCCTGAGAGAGCGAAAGCTTTCGGAA | 3087 | 38 | 0.526315789 | 13 |
| GGAGCAACACGGGTTGAGAGCAATTGATTTCTCCGCCA | 3088 | 38 | 0.526315789 | 14 |
| GTATGGGCCTGCACGTGGTAACAAGATGAGGAACGTGA | 3089 | 38 | 0.526315789 | 15 |
| GAGCCCACACATACTCGTGTTTGGTTCCCTTGACGAGA | 3090 | 38 | 0.526315789 | 16 |
| GAGTGACAGGAAACCCTCGTATGTCGGCGCACAGTATA | 3091 | 38 | 0.526315789 | 17 |
| GCCACACCACACCCGTGAGAAACGAAAGATTCCAGAGA | 3092 | 38 | 0.526315789 | 18 |
| GTGGAGCACACGAGGACTGGTTCTGGTGTACATAGGTA | 3093 | 38 | 0.526315789 | 19 |
| GTGTGGGAGGTCACAACCTCGAGTGTCGCCCTCCGGTA | 3094 | 38 | 0.631578947 | 20 |
| TGTGGGCGTACAATACTCTCGGCCGCGGACAGGGACGA | 3095 | 38 | 0.631578947 | 21 |
| GCGGTGGAGCATACCCAGTTCCGCGCGATCGATCGTGA | 3096 | 38 | 0.631578947 | 22 |
| GGGACGGAGCCATGCAAATGCCCGCATGCCTCCGAGAA | 3097 | 38 | 0.631578947 | 23 |
| GGCGCCTTTGCCATGGCGTGAACGCATAGCGGCAGAGA | 3098 | 38 | 0.631578947 | 24 |
| GGATGAGGCCGAGGCAGGCAGCATCGGACCATCATGCA | 3099 | 38 | 0.631578947 | 25 |
| GACCGCCCGTTCTGCATGTATGCGCAAGCGTCGACGCA | 3100 | 38 | 0.631578947 | 26 |
| GTCACCAAGGACCACGGCTTGGGCCTCGACAGAGCTGA | 3101 | 38 | 0.631578947 | 27 |
| TCGGTTCGGGCGAAACCCAGGAGACGCGTACCGGAAGA | 3102 | 38 | 0.631578947 | 28 |
| GTACAGAGCTCGGCCCGAGATACCGCCGCGGTGCGCCA | 3103 | 38 | 0.710526316 | 29 |
| GCCGGCAGGCCCGCAGGCGCTGTTCGGCTCAATTGGCA | 3104 | 38 | 0.710526316 | 30 |
| GCCGTGCGTCGGGCGAGGTGCCGGGAGCATGTGTGACA | 3105 | 38 | 0.710526316 | 31 |
| GAGGTGCCCGGTGCCGCTGAAAGCAGCGTTCGCCCGCA | 3106 | 38 | 0.710526316 | 32 |
| TTCGCCCGGGCCCGTAGAGAAGGCTCGGCGTGCGGCAA | 3107 | 38 | 0.710526316 | 33 |
| GGTGACGTTTCCCGTCCCTGGACGCAGCGTGGCGGGCA | 3108 | 38 | 0.710526316 | 34 |
| GCCATGCAGGCGTAACGCGGAGAGGTCCGGCCGCCGTA | 3109 | 38 | 0.710526316 | 35 |
| GGCAGCGTGCGCCCGGCTGATAGGCGGTTCTCGCAGCA | 3110 | 38 | 0.710526316 | 36 |
| GGCAACGCGCGGCAGGCGGCCGATAAAGCCTGGGCACA | 3111 | 38 | 0.710526316 | 37 |
| GGAAGGCCCGCCGACGGCTCGGGCCGCACCGCGATGCA | 3112 | 38 | 0.789473684 | 38 |
| GCCACGCGGCCGAGTCGCTCCCGGGCCGGGTGTGCGTA | 3113 | 38 | 0.789473684 | 39 |
| GCCGCGCTCCGCGCGAGGTGACGGTCCGGAGTCGGCCA | 3114 | 38 | 0.789473684 | 40 |
| GGTCTCGTGCGGAGGCCACGCGCGCGTGGTGGCGCGCA | 3115 | 38 | 0.789473684 | 41 |
| GGCCGGCCCTCGCCGCCTTCTGGGCGGCTCATCCGCCA | 3116 | 38 | 0.789473684 | 42 |
| GCCGTCTTCCCGGGCCCGCGGCCTCGGTCGACCTGGCA | 3117 | 38 | 0.789473684 | 43 |
| TTTCCGGGCTCCGCGGCGCACATCCCGGCGCCGGGCGA | 3118 | 38 | 0.789473684 | 44 |
| GTGCTCGCCGGGCACGTCCGCGCCAGCCGCGGCTTCGA | 3119 | 38 | 0.789473684 | 45 |
| GCTGCCCGGCACGCGGGCGTACCCTGGGCCCGTACGGA | 3120 | 38 | 0.789473684 | 46 |
| GCGGCCCACAGATAAGAGGCGGA | 3121 | 23 | 0.652173913 | 47 |
| TCGCATGGACCCGACGGTTGGCA | 3122 | 23 | 0.652173913 | 48 |
| GGCTTGTTGCGGGTGCGCTCGAA | 3123 | 23 | 0.652173913 | 49 |
| GGTTCGCAACCCTGCTGCGCGAA | 3124 | 23 | 0.652173913 | 50 |
| GTACCTGTCCCGCACCGGCCAAA | 3125 | 23 | 0.652173913 | 51 |
| GGGAGGAGGCCATCGCCAAACGA | 3126 | 23 | 0.652173913 | 52 |
| GACACGTAGACGGCTCGCCGAGA | 3127 | 23 | 0.652173913 | 53 |
| GGGTCTGATGCCCGAGACCACGA | 3128 | 23 | 0.652173913 | 54 |
| TGCGCAGAGACACGGACTGGGCA | 3129 | 23 | 0.652173913 | 55 |
| TGATCTGTGGCGATACATGCGCGGCCCACTGCGCCGCCCATTGCACA | 3130 | 53 | 0.622641509 | 56 |
| AACGCA | | | | |
| GCCCGACATCCATAGTGAAACAGCCACGTTGCTGTGGCGACCGTGG | 3131 | 53 | 0.622641509 | 57 |
| CCTCCGA | | | | |
| TTGGAGTAGCAATGCGTGTCGGGTTGTCCGAGCTGCGCCGTGCGTG | 3132 | 53 | 0.622641509 | 58 |
| ACCGAGA | | | | |
| TCCCTTGCGCGGCGGCAAACCTGATATGGCTCGGGACCGATACCAC | 3133 | 53 | 0.622641509 | 59 |
| GGAGCAA | | | | |
| GGTCCTCTCCACCACAACGGCCGCAATAATAGGTACCCAGGCCGCA | 3134 | 68 | 0.632352941 | 60 |
| CTCCCGTTGGCGCCACACCCAA | | | | |
| TGGTGCAGCCAGGGTCTGCTTGACTTTCGCCACCCAGCTCTTGCACA | 3135 | 68 | 0.632352941 | 61 |
| CTCCGCGTACGACGCCAGCGA | | | | |
| TGTTCCTGACGGCTGGGTAGCTTCGCCTTGCAGCGTGTACATGGAGC | 3136 | 68 | 0.632352941 | 62 |
| TTCCCGGCCTGCCACAGCCGA | | | | |
| GACGCGGAAGCCTTCCTCCTGCGTAGTCCGGTACGACCCTGCTGCGC | 3137 | 68 | 0.632352941 | 63 |
| AGAAAGGACACTGCCCGGTAA | | | | |
| GCATACCACCCATCTCGGGACACCGCCGTTCGCGCACGCTGTGGAT | 3138 | 68 | 0.632352941 | 64 |
| GGATGCCCTGATCCGCGTTGTA | | | | |
| GGTAGACCGCCTCCGGAGGCTCTTCGAGCCATCCCACGAAGCTGTC | 3139 | 68 | 0.632352941 | 65 |
| CAGTCCGATTCAGGCGAGAGGA | | | | |
| GGCTGCGCGGGCGTCCGCTTGCACCCTTGTAACGCAATCGGGCGTA | 3140 | 68 | 0.632352941 | 66 |
| AGGACGCAGTATCAGTCGGCAA | | | | |
| GGAAGACAGCCGCCACATATCCACTGCAGGGCCACCCTTTCGCTTC | 3141 | 68 | 0.632352941 | 67 |
| GTTGGCCGGTTTCGCTCCGGGA | | | | |
| GAAATCGAGCGAGGTTCCGTCGTCGGCGCAAGTGGTGGCTTCGCGT | 3142 | 68 | 0.632352941 | 68 |
| GGGTGGGTTGCCTCTTGCTGGA | | | | |
| GCGTGACCTCGCCGCTTCAAGGCCGCGCACGTCGATCGTGAGTAGA | 3143 | 83 | 0.626506024 | 69 |
| TTGAGGAAGGGCTGTCCTTGGCTCTGTCCTCCTCGGA | | | | |
| TCCCATCCAGTACAGCCCGGTCCGACTGTGCGCGATAGGTGTGAAG | 3144 | 83 | 0.626506024 | 70 |
| GCTGAGCGCGCAGTATCTCGAGGGTGTGAAGGCGGGA | | | | |
| GATAGCTTGGCCAGCAAGTGGCGCGCCCACCGGCGATCGGCATCCT | 3145 | 83 | 0.626506024 | 71 |
| GTGCCTTGGCTTCCGGTGTTGCCACAATTGGCTGCAA | | | | |
| GGCTGTGCGCGCCTTCGTCGCAGTCCGCTTCGTGGCAGTCCCTGCCA | 3146 | 83 | 0.626506024 | 72 |
| CCCTGATTGGGCATTTCTCGTGGTGTCTTTGGCCAA | | | | |
| TGGGATGACCAGAAGACGGACCATCTGCCGTCGGTCGACACTGAGT | 3147 | 83 | 0.626506024 | 73 |
| TCTGCCGACGGCCCTGCGCGTACGGGCCACTCAGTAA | | | | |
| GGCTCCGGCGACTTTCGAAGCTCCGCAAGCAGACGTGCAGGAAGAC | 3148 | 83 | 0.626506024 | 74 |
| CGGTTTGAAACGCAACGTACCGAACCGCAGGCCGCGA | | | | |
| TCCACACGGGACACCGGAGTGGCGTTGCCAGAGGCGTCGAGGCAAT | 3149 | 83 | 0.626506024 | 75 |
| ATGGCACGAGTGCCTCTTTCAAACGGCTCAGGCGCCA | | | | |
| GGCACGGCTGTGCAACGCCGCCGTCTCTGACATAGCGGCAACCGTA | 3150 | 83 | 0.626506024 | 76 |
| GTGGGTCCGTACAGAAGGACGCGATTGCCGCGTATGA | | | | |
| GGGTGTACGCTCCGCTCTCCTTGACAAGGCGGATCCCGCCGCCGTGA | 3151 | 83 | 0.626506024 | 77 |
| TCTGGTCTGTTCTGAGCGAGTCTGACGGTAGTGGGA | | | | |
| TCGCTCCCAGGTGTCCTCCTCCTCCCAGCGGGTCGCGCTGAGCCAAC | 3152 | 83 | 0.626506024 | 78 |
| AAAGCCGAGGAGAATGCTCCAATCGTAAGTCGCCCA | | | | |
| ACACCATCATCACCATCATCGTGC | 3153 | 24 | 0.5 | 79 |
| AAAGTCTCATTTGACTTA | 3154 | 18 | 0.28 | 80 |
| AAGCAGCTCACTTAA | 3155 | 15 | 0.4 | 81 |
| AAGCGTGGCATGAGTGCGCCACCGTCTG | 3156 | 28 | 0.64 | 82 |
| AAGCTCCTCAATTCCATTCACAAGA | 3157 | 25 | 0.4 | 83 |
| AAGGAAAGAGAGCCCGCCTCTCTCC | 3158 | 25 | 0.6 | 84 |
| AAGGGCGGTGGCCCG | 3159 | 15 | 0.8 | 85 |
| AAGGTAAGGTGCACAAACACCTTGC | 3160 | 25 | 0.48 | 86 |
| ACAGCACCATCTAGTGTAAA | 3161 | 20 | 0.4 | 87 |
| ACATGGAGAACAGAATATCTCTTGTGCAGA | 3162 | 30 | 0.4 | 88 |
| ACCACGACCTATATGTGATCCTTTA | 3163 | 25 | 0.4 | 89 |
| ACCAGCCGGCTTCCGCCGGC | 3164 | 20 | 0.8 | 90 |
| ACCCAAGAGGAGGGCAGA | 3165 | 18 | 0.61 | 91 |
| ACCCCACGTATCAGCAAAGTGCAACCCTTT | 3166 | 30 | 0.5 | 92 |
| ACCCCGCGGGGCGTGTGCCCATACCCCGGC | 3167 | 30 | 0.8 | 93 |
| ACCCGTGGGAGTGTCGAGCACTTGGATCAC | 3168 | 30 | 0.6 | 94 |
| ACGAGGCGGCCCTTGCGCCGCACCC | 3169 | 25 | 0.8 | 95 |
| ACGCCGATAGGGCAA | 3170 | 15 | 0.6 | 96 |
| ACGGAAGGCGCGGTCCGCGCAGGGG | 3171 | 25 | 0.8 | 97 |
| ACGGGCGCGGCCGCAACGGCGC | 3172 | 22 | 0.86 | 98 |
| ACGTGCGCGCTCAATACTCAATGTAACGTCCCACA | 3173 | 35 | 0.51 | 99 |
| ACTGAGAGGCGGGGCGCGGGTCGTTAAGGCCCCAT | 3174 | 35 | 0.69 | 100 |
| ACTGGGGCGCTGCGTACTCCCCTCC | 3175 | 25 | 0.72 | 101 |
| AGAACGGCCAAAGGT | 3176 | 15 | 0.53 | 102 |
| AGCAGCTATG | 3177 | 10 | 0.5 | 103 |
| AGCCCAGTTACTCAATTTCCTGTAATAGTG | 3178 | 30 | 0.4 | 104 |
| AGCCCATGCCCCGGC | 3179 | 15 | 0.8 | 105 |
| AGCCGCCGTGCGGCA | 3180 | 15 | 0.8 | 106 |
| AGCTACTTGTGTAAC | 3181 | 15 | 0.4 | 107 |
| AGCTAGGCCC | 3182 | 10 | 0.7 | 108 |
| AGCTCACTATAATCTGAGCT | 3183 | 20 | 0.4 | 109 |
| AGCTCGCGGAACAGCGCGAC | 3184 | 20 | 0.7 | 110 |
| AGCTTGAGATGACAGTGATCTCGGAAATTGATCTA | 3185 | 35 | 0.4 | 111 |
| AGGACCCTCGGTCGT | 3186 | 15 | 0.67 | 112 |
| AGGCAGGATCTTGAAATT | 3187 | 18 | 0.39 | 113 |
| AGGCCTGGCGTCCAGGCC | 3188 | 18 | 0.78 | 114 |
| AGGCGCGTAGGTGAC | 3189 | 15 | 0.67 | 115 |
| AGGCGGAAGACCGGCCGA | 3190 | 18 | 0.72 | 116 |
| AGGCGGTTCGATGAGCCGGCGG | 3191 | 22 | 0.73 | 117 |
| AGTCCTCAGTACCCCGAGCCGTGACGTCGGTTCGC | 3192 | 35 | 0.66 | 118 |
| AGTGTTTACCTTATCTGCTTACGTAGTACC | 3193 | 30 | 0.4 | 119 |
| ATACCCTAATGACCTGTCCTTTACTCTCGGCCGGCAGTAT | 3194 | 40 | 0.5 | 120 |
| ATAGGCGATTTCCGTCCAAG | 3195 | 20 | 0.5 | 121 |
| ATATGCATCGCTCAA | 3196 | 15 | 0.4 | 122 |
| ATCAGCGTCTTGCCTGGACC | 3197 | 20 | 0.6 | 123 |
| ATCCCTTGCTTCCCCACGGGTAAGCTCG | 3198 | 28 | 0.61 | 124 |
| ATCTCGCCACGGACACTGGTCC | 3199 | 22 | 0.64 | 125 |
| ATCTGCGTAGTTACT | 3200 | 15 | 0.4 | 126 |
| ATGAGTCCAGGCCATGTGAAAC | 3201 | 22 | 0.5 | 127 |
| ATGCAGACCTGCCACGCTAG | 3202 | 20 | 0.6 | 128 |
| ATGCCAATGGGGCAA | 3203 | 15 | 0.53 | 129 |
| ATTCATGTGTTCGATTCTCCCTCGGGCACA | 3204 | 30 | 0.5 | 130 |
| ATTGCTCAGGCGAACCCGTAGC | 3205 | 22 | 0.59 | 131 |
| CAAATCGATGATCCT | 3206 | 15 | 0.4 | 132 |
| CACCTGCCCAGCTGT | 3207 | 15 | 0.67 | 133 |
| CACGAGCTCCGCCAAGTGACCACCGATG | 3208 | 28 | 0.64 | 134 |
| CACGGCCGGGCCGCCGCTCT | 3209 | 20 | 0.85 | 135 |
| CACGTGCGCTTCGGGTTTCGTTCGCCGATT | 3210 | 30 | 0.6 | 136 |
| CACTACGGACAGGGC | 3211 | 15 | 0.67 | 137 |
| CACTATAGGTATGCAATG | 3212 | 18 | 0.39 | 138 |
| CACTGCACCGCTTCGGTCTGCGGCC | 3213 | 25 | 0.72 | 139 |
| CAGCCCCGGGACGGCCGC | 3214 | 18 | 0.89 | 140 |
| CAGCCTAGGC | 3215 | 10 | 0.7 | 141 |
| CATCGGCCGCCGGCGGTTGGGG | 3216 | 22 | 0.82 | 142 |
| CCACCGCGGCCCGGGGCAGGCT | 3217 | 22 | 0.86 | 143 |
| CCAGGAAGAAATTAGAGAGAATCTTGCTCA | 3218 | 30 | 0.4 | 144 |
| CCAGTGTCAG | 3219 | 10 | 0.6 | 145 |
| CCATATCAATCGGGGCCCAGGCGGTGTCTT | 3220 | 30 | 0.6 | 146 |
| CCCCGCCGCCCCGTCCGGCC | 3221 | 20 | 0.95 | 147 |
| CCCCGGCCCCGGGCCCGGGAGCGGCGGGCCGGGTG | 3222 | 35 | 0.94 | 148 |
| CCCGCCGGTG | 3223 | 10 | 0.9 | 149 |
| CCCGGAATCCGGCCGTACCA | 3224 | 20 | 0.7 | 150 |
| CCCGGCGCCACCCGG | 3225 | 15 | 0.93 | 151 |
| CCCGGCGCCTGAGCCCGGCCGCCGA | 3226 | 25 | 0.88 | 152 |
| CCCGGGGCCTTGGGGCTGCCTCGCC | 3227 | 25 | 0.84 | 153 |
| CCCGTAACGCCCACCCGCGAAC | 3228 | 22 | 0.73 | 154 |
| CCCGTCGCGGAGGAGGGTAG | 3229 | 20 | 0.75 | 155 |
| CCCGTGCCCTCGGTCACGCCGACTTCAC | 3230 | 28 | 0.71 | 156 |
| CCCTTGCCGG | 3231 | 10 | 0.8 | 157 |
| CCGAGGCCGAAACCGGAAACTACCA | 3232 | 25 | 0.6 | 158 |
| CCGAGGTCTAGGGTGTCCGA | 3233 | 20 | 0.65 | 159 |
| CCGATCCCGGCCCGCCCGCGCC | 3234 | 22 | 0.91 | 160 |
| CCGCACTCGGCCCGTGGGGC | 3235 | 20 | 0.85 | 161 |
| CCGCCCGTCGTGGAGGCGGGCTGCAGCT | 3236 | 28 | 0.79 | 162 |
| CCGCCGAGCGGCCACCCTAGGGCTGGCGGCGCGGG | 3237 | 35 | 0.86 | 163 |
| CCGCGAGGCTCGTCGCGCTGCCAAACTCGCCGGGCCCCGC | 3238 | 40 | 0.8 | 164 |
| CCGCGCCGCGGAGGCGGGCGGC | 3239 | 22 | 0.95 | 165 |
| CCGCGCGGAGGTTACGGC | 3240 | 18 | 0.78 | 166 |
| CCGCGCGGGCACGGCCGGGCCGCGCCTGGCGCGCCGGCGC | 3241 | 40 | 0.95 | 167 |
| CCGCGCGTGCCAGGCCCCGACGGGAGGCCCCAGCG | 3242 | 35 | 0.86 | 168 |
| CCGCGCTGGC | 3243 | 10 | 0.9 | 169 |
| CCGCTTGCGAACAAT | 3244 | 15 | 0.53 | 170 |
| CCGGCCCCTGAGGCCGGGCCCC | 3245 | 22 | 0.91 | 171 |
| CCGGCCTGGCCTTCTAAAGG | 3246 | 20 | 0.65 | 172 |
| CCGGCGCCACAGGCCGTGCCGCTGCGGGGC | 3247 | 30 | 0.87 | 173 |
| CCGGCGGACA | 3248 | 10 | 0.8 | 174 |
| CCGGCTCCGTAGCGATCGAAGCTAG | 3249 | 25 | 0.64 | 175 |
| CCGGCTCGCAGGCTGGGCCGATACCGTCGA | 3250 | 30 | 0.73 | 176 |
| CCGGGAGGTGGCCGTTGTTGCGCGCCGT | 3251 | 28 | 0.75 | 177 |
| CCGGGGAACGGCTTCCCCGGCGGCCCGGCTCGTAC | 3252 | 35 | 0.8 | 178 |
| CCGGTAGCACGTCCG | 3253 | 15 | 0.73 | 179 |
| CCGTAGTATTGACACCTACTGCCAT | 3254 | 25 | 0.48 | 180 |
| CCGTCCTCCG | 3255 | 10 | 0.8 | 181 |
| CCTATACACGGCCGCCCGCA | 3256 | 20 | 0.7 | 182 |
| CCTCGGTGACCCGCA | 3257 | 15 | 0.73 | 183 |
| CCTGAGCCTCGTGGC | 3258 | 15 | 0.73 | 184 |
| CCTTAAGCGTTATTGTCCCCTTTAA | 3259 | 25 | 0.4 | 185 |
| CCTTATCATCTTTAAGTTTC | 3260 | 20 | 0.3 | 186 |
| CGACAGGAGCGTCGCACACGCTCGGTCTCC | 3261 | 30 | 0.7 | 187 |
| CGACCTATTGGGACGCGGAGCG | 3262 | 22 | 0.68 | 188 |
| CGACTGCTCGGCGCAGCCCACAAGG | 3263 | 25 | 0.72 | 189 |
| CGAGGCCAGGGCGGC | 3264 | 15 | 0.87 | 190 |
| CGCCACCGGGTTCTCCGGTACCTGCGGCTTGGCCC | 3265 | 35 | 0.74 | 191 |
| CGCCCAGGTCCAATAGGTGAAATATGCT | 3266 | 28 | 0.5 | 192 |
| CGCCCCAGCCCGCGCCGGCCCGCGCCCAATGCCCGCGCGC | 3267 | 40 | 0.9 | 193 |
| CGCCCCGATCCTCGTGGCCGCTCGG | 3268 | 25 | 0.8 | 194 |
| CGCCCCGGGCCGGGGAGGCTGAGCGGGC | 3269 | 28 | 0.89 | 195 |
| CGCCGCGCACCGCGCGTGGCGTCCCCGG | 3270 | 28 | 0.89 | 196 |
| CGCCGGAGCGGCCGGGTA | 3271 | 18 | 0.83 | 197 |
| CGCGCCGGCCGTCGCCCAGC | 3272 | 20 | 0.9 | 198 |
| CGCGCGCGCTGCGGAGGGTGGTAGG | 3273 | 25 | 0.8 | 199 |
| CGCGCTAGCGGGACCGGATGTCCCCTGCCCTACTT | 3274 | 35 | 0.69 | 200 |
| CGCGGCGGCCGGCACCGCGTCGCGCGCTGGCGGCG | 3275 | 35 | 0.91 | 201 |
| CGCGGGAGCCGGCCGCCGGCGCCGCCCC | 3276 | 28 | 0.96 | 202 |
| CGCGTCCGCTGCCGGCGGGCGACGC | 3277 | 25 | 0.88 | 203 |
| CGCTCCGCGAGGAACCCCTCCTTCG | 3278 | 25 | 0.72 | 204 |
| CGCTCGCTCG | 3279 | 10 | 0.8 | 205 |
| CGGAGATCTTGCTAAGACAAATGCAAGATT | 3280 | 30 | 0.4 | 206 |
| CGGCAGACTCGCGCGTGGGCCGGGCCCCGTCCGGGCGACG | 3281 | 40 | 0.85 | 207 |
| CGGCCACCAGCGCGCGAT | 3282 | 18 | 0.78 | 208 |
| CGGCGCGCTGTACGAGGG | 3283 | 18 | 0.78 | 209 |
| CGGCTACGTCCCGGGACGTGCCCCGTGC | 3284 | 28 | 0.79 | 210 |
| CGGCTGGTCGCCGGG | 3285 | 15 | 0.87 | 211 |
| CGGGAGGCTGGGGCGCGGGGCCCGGCGCAC | 3286 | 30 | 0.9 | 212 |
| CGGGCCCCGCGTGCG | 3287 | 15 | 0.93 | 213 |
| CGGGCCGCACCCGACACCACCGCAA | 3288 | 25 | 0.76 | 214 |
| CGGGGAGCTCCGCTGATG | 3289 | 18 | 0.72 | 215 |
| CGGTAATGGCACTCTAACCGCCCTC | 3290 | 25 | 0.6 | 216 |
| CGGTCCGCGCGCAGCGACTTTC | 3291 | 22 | 0.73 | 217 |
| CGGTCCGGCCCGGGG | 3292 | 15 | 0.93 | 218 |
| CGGTGTTCGGGAAGATCG | 3293 | 18 | 0.61 | 219 |
| CGTAGGGCTTCAGTGTACCCGTGCA | 3294 | 25 | 0.6 | 220 |
| CGTATCATATTAAATACCAACGAGATAT | 3295 | 28 | 0.29 | 221 |
| CGTCGATGGGTCCGACGCCC | 3296 | 20 | 0.75 | 222 |
| CGTGCCGCGCGTGTC | 3297 | 15 | 0.8 | 223 |
| CGTGGGTCGCAACACGGCCCCTCAG | 3298 | 25 | 0.72 | 224 |
| CGTGGGTCGTCCGCTGTTAGGA | 3299 | 22 | 0.64 | 225 |
| CGTTCTGGCGAGCCGCGCGGCGTGCCGGGAGGGGA | 3300 | 35 | 0.8 | 226 |
| CTAAGATGTAGCCCTTGGTAATAGGTAA | 3301 | 28 | 0.39 | 227 |
| CTAGAATGACTTATGCGATAGAGTGCTA | 3302 | 28 | 0.39 | 228 |
| CTAGCACTGC | 3303 | 10 | 0.6 | 229 |
| CTATCATGCATGGCGATCCCAGGTTCGCGC | 3304 | 30 | 0.6 | 230 |
| CTCAGAGCAGCACTGAGTCGGC | 3305 | 22 | 0.64 | 231 |
| CTCCCCTCGTATCGAGCGTGATCTCTCC | 3306 | 28 | 0.61 | 232 |
| CTCCGTTCTTCGGCGCGCTGAGTCCGCCAT | 3307 | 30 | 0.67 | 233 |
| CTCGTCACTGGATGTGAAGT | 3308 | 20 | 0.5 | 234 |
| CTCTCTCTTCTGACTCGCTT | 3309 | 20 | 0.5 | 235 |
| CTGCTAGGGCGGTACGCCGGCGGGGCGCTG | 3310 | 30 | 0.8 | 236 |
| CTGGACGAGGTCGTGGCGGTCGAGTAAGGC | 3311 | 30 | 0.67 | 237 |
| CTGTACCCGTAGCCGCGGCCCCATCCGAGG | 3312 | 30 | 0.73 | 238 |
| CTTTACATCAGAATT | 3313 | 15 | 0.27 | 239 |
| GAAAGTAATTACACCTTACCTATCA | 3314 | 25 | 0.32 | 240 |
| GAAGCCGTAC | 3315 | 10 | 0.6 | 241 |
| GACGACATAAGTACCCCA | 3316 | 18 | 0.5 | 242 |
| GACGCTCGGACCGGATAG | 3317 | 18 | 0.67 | 243 |
| GACGGAGGCCGGGATGCCTTCGCCGCTCAG | 3318 | 30 | 0.73 | 244 |
| GACGGCCCGCGTGACTGCGACCCACAGC | 3319 | 28 | 0.75 | 245 |
| GACGTCGTTGTGTGC | 3320 | 15 | 0.6 | 246 |
| GAGAGATATATTCGACTCTTCCCTA | 3321 | 25 | 0.4 | 247 |
| GAGGGCGAACGACCCGTCCCTCTGCGGGTT | 3322 | 30 | 0.7 | 248 |
| GAGGTTCCCACCCGTAGT | 3323 | 18 | 0.61 | 249 |
| GAGTGCGATGCACAG | 3324 | 15 | 0.6 | 250 |
| GATAATCTTTAACAACGTGAAGAATTCATGTTTGA | 3325 | 35 | 0.29 | 251 |
| GATATGATACTGAACGCCCCTAGTGCCAATGGACC | 3326 | 35 | 0.51 | 252 |
| GATTTGATAATCTCGTATATAGAGCAGTTA | 3327 | 30 | 0.3 | 253 |
| GCAATGCACCGCCGTGGGCGCCGTATCG | 3328 | 28 | 0.71 | 254 |
| GCACATGTCCACGCCAGCAGCGCCAGGTGGCGGACAGGGA | 3329 | 40 | 0.7 | 255 |
| GCACGCTCTCGTCGGTCCGCCCTGCGCCGG | 3330 | 30 | 0.8 | 256 |
| GCAGATAATCGATAGAGT | 3331 | 18 | 0.39 | 257 |
| GCATCGGACGCTGCGACGGCGCCGGCCCCGGCAGT | 3332 | 35 | 0.8 | 258 |
| GCATGATGTGAGATCCAACGTTTATTCTTC | 3333 | 30 | 0.4 | 259 |
| GCATGCACAGGCACAATGTCTGTTT | 3334 | 25 | 0.48 | 260 |
| GCCAGGCCCCGACCGCTGGAGCGCG | 3335 | 25 | 0.84 | 261 |
| GCCCCACGCCACGGCATTTCCA | 3336 | 22 | 0.68 | 262 |
| GCCCGACAGCGCGCGCAT | 3337 | 18 | 0.78 | 263 |
| GCCCGCTCCCGCCGCCCG | 3338 | 18 | 0.94 | 264 |
| GCCGCCCCGGGGACGTCCCGTTGCC | 3339 | 25 | 0.84 | 265 |
| GCCGGAGCAGGGCCGACTGG | 3340 | 20 | 0.8 | 266 |
| GCCGTCGTGGAGGCAAGGCCTGCGT | 3341 | 25 | 0.72 | 267 |
| GCCTCCCGCTCACACTCCAACCGGCTGCGGGCACG | 3342 | 35 | 0.74 | 268 |
| GCCTCCGCCCACCGC | 3343 | 15 | 0.87 | 269 |
| GCCTGAGATTCGAAGCCGCT | 3344 | 20 | 0.6 | 270 |
| GCCTGCACCCTTGCTCCTCGACGAGGGCCCGCACCGGTCG | 3345 | 40 | 0.75 | 271 |
| GCGAAACCTCAGGTCGCCGTTTCCT | 3346 | 25 | 0.6 | 272 |
| GCGAGCTAGGGCCAAGCCTGTGGCGGTCCA | 3347 | 30 | 0.7 | 273 |
| GCGAGTGCCAGTCGCCCGGGGC | 3348 | 22 | 0.82 | 274 |
| GCGCGATGTCAGCTACACCACTTCG | 3349 | 25 | 0.6 | 275 |
| GCGCGCTGACCGGCGCGGCCACCACCCGGG | 3350 | 30 | 0.87 | 276 |
| GCGCGGCGTCTACTCCTCGCCTCTACCTCG | 3351 | 30 | 0.7 | 277 |
| GCGGAGACAGTTCTTAGATC | 3352 | 20 | 0.5 | 278 |
| GCGGATTGAACACGA | 3353 | 15 | 0.53 | 279 |
| GCGGCAAGAATGTCC | 3354 | 15 | 0.6 | 280 |
| GCGGCCTTAAGTTCGCTCTCACCCCGTCGTCACCAGGACC | 3355 | 40 | 0.65 | 281 |
| GCGTGTAACGCGCGGGCT | 3356 | 18 | 0.72 | 282 |
| GCTACGGCCGGAGTGTTC | 3357 | 18 | 0.67 | 283 |
| GCTCCGCATGGTCTCTGAACGGACGACCGG | 3358 | 30 | 0.67 | 284 |
| GCTCTCTTGGCAGCGGCTTCCCCACTTCTGGGCGC | 3359 | 35 | 0.69 | 285 |
| GCTCTTTCAGCGGCTAAATCTTAGAGCGAG | 3360 | 30 | 0.5 | 286 |
| GGACGGCCCGTACAT | 3361 | 15 | 0.67 | 287 |
| GGACTATCCCTCCATGGCGT | 3362 | 20 | 0.6 | 288 |
| GGAGGCTCGCACCGAAATCAGCGAC | 3363 | 25 | 0.64 | 289 |
| GGATCGTCCCTCAGGGGCAG | 3364 | 20 | 0.7 | 290 |
| GGATGTCCATTGGACCGCGCTTCGGTGC | 3365 | 28 | 0.64 | 291 |
| GGATTCCGGTACCCGCGGGGTGGCCTTGGA | 3366 | 30 | 0.7 | 292 |
| GGCACCCCGGCGTGCGCG | 3367 | 18 | 0.89 | 293 |
| GGCACCGGGGCACCGCCACCCCACGCGG | 3368 | 28 | 0.86 | 294 |
| GGCAGCGGGCTCGGGGACCCGTGAG | 3369 | 25 | 0.8 | 295 |
| GGCCGATGCCAGTGACCCGTTCAACGGGCCGGGCG | 3370 | 35 | 0.74 | 296 |
| GGCCGGCCCTGCCTCCGCTCCGGTGCGC | 3371 | 28 | 0.86 | 297 |
| GGCCGGGCCTCGCGGGGCGCCCGGG | 3372 | 25 | 0.96 | 298 |
| GGCCGGGCGTCGCGGCCCGGTGCGGCCGGC | 3373 | 30 | 0.93 | 299 |
| GGCGAAGCATAGAGTCTCCGCTTCC | 3374 | 25 | 0.6 | 300 |
| GGCGCCGGCCTGGGAGCCCGGGCCTGGGCC | 3375 | 30 | 0.9 | 301 |
| GGCGGCGGGAGCGGCCCGTACGACGGGG | 3376 | 28 | 0.86 | 302 |
| GGCTCCTCCTCGCGCGGG | 3377 | 18 | 0.83 | 303 |
| GGCTTGTCGACGACGGCGGTCTCCGTCGTCAGGATCAT | 3378 | 38 | 0.63 | 304 |
| GGGACCATATGGTACCACCTGG | 3379 | 22 | 0.59 | 305 |
| GGGACCCCGGTGTCCCCTTT | 3380 | 20 | 0.7 | 306 |
| GGGACTACACTAGGGCGGAG | 3381 | 20 | 0.65 | 307 |
| GGGCCCGGTCCACCTGGGACCTTCGGCGCC | 3382 | 30 | 0.8 | 308 |
| GGGCCGAACCGGACCTACGGCCACG | 3383 | 25 | 0.76 | 309 |
| GGGCCGTGGGAGCCTCCGTCACCAC | 3384 | 25 | 0.76 | 310 |
| GGGCGCACATCGGCGGCCCG | 3385 | 20 | 0.85 | 311 |
| GGGCGGCCACTGGGGAGC | 3386 | 18 | 0.83 | 312 |
| GGGGCCCTCCGACCCGCCTAGG | 3387 | 22 | 0.82 | 313 |
| GGGGCGCGCACAGGCGACCT | 3388 | 20 | 0.8 | 314 |
| GGGTCGTTATTCTACCCATCCT | 3389 | 22 | 0.5 | 315 |
| GGGTGCCATCTTCCTGGGTAGAGGCGGGACATGCG | 3390 | 35 | 0.66 | 316 |
| GGTAGAGAAGTGACATAATCTTTGTTGTCG | 3391 | 30 | 0.4 | 317 |
| GGTCCCCGCT | 3392 | 10 | 0.8 | 318 |
| GGTCGCAACTGTGTGCACCT | 3393 | 20 | 0.6 | 319 |
| GGTCGGGAGTGACCT | 3394 | 15 | 0.67 | 320 |
| GGTGCCGCAG | 3395 | 10 | 0.8 | 321 |
| GGTGTTCCCAAGCGAAGTCCCTCTGGCAAAGGTGAGGAGG | 3396 | 40 | 0.6 | 322 |
| GTAATCCAAGCTCACTAGGGGCACAACTTG | 3397 | 30 | 0.5 | 323 |
| GTACATGGCAGAGAGCAA | 3398 | 18 | 0.5 | 324 |
| GTATGGTTAATTGCC | 3399 | 15 | 0.4 | 325 |
| GTCGCGGTCACTCGCGGGAT | 3400 | 20 | 0.7 | 326 |
| GTGCCGGAGCGCGGGCCACA | 3401 | 20 | 0.8 | 327 |
| GTGCGCCTGTGGCGC | 3402 | 15 | 0.8 | 328 |
| GTGGTCCGACTCGAG | 3403 | 15 | 0.67 | 329 |
| GTGTCTCATGTTTCCTTGTATTACGTTACC | 3404 | 30 | 0.4 | 330 |
| GTGTGGAGCTATCTAGGAATACGCA | 3405 | 25 | 0.48 | 331 |
| GTGTTGAGCCCGCGAGGTCGTTCGGCGGTAACGGT | 3406 | 35 | 0.66 | 332 |
| TAATGCAGCAACGGTCGCGACTCCCTGTGACTGCG | 3407 | 35 | 0.6 | 333 |
| TACCCGGCGTCCGCGTCC | 3408 | 18 | 0.78 | 334 |
| TAGCACGTGGTTTCGCCCTTCTGGCTACCTAGGGG | 3409 | 35 | 0.6 | 335 |
| TAGGGGTCGCCTGGGTGCTCGAGGGCGT | 3410 | 28 | 0.71 | 336 |
| TATAGTGTGTTGATTCCATCGTTGCAGA | 3411 | 28 | 0.39 | 337 |
| TATATGCATTACCCCGATAC | 3412 | 20 | 0.4 | 338 |
| TATCAGCGGTACCCTTAACAAAGTCTCTTTGAGAA | 3413 | 35 | 0.4 | 339 |
| TCAAGTCAGGAAATATAGAGCTGAC | 3414 | 25 | 0.4 | 340 |
| TCAGAAACCGGCGTAGAA | 3415 | 18 | 0.5 | 341 |
| TCATACACAGAGCAAACTCCAA | 3416 | 22 | 0.41 | 342 |
| TCGAGCCGCGTGAGTCATTGTACTCTACGGCGGTC | 3417 | 35 | 0.6 | 343 |
| TCGGCCCCGCGCCAGGGGCGCGATCCGCCG | 3418 | 30 | 0.87 | 344 |
| TCGGCCCCGCGTGCA | 3419 | 15 | 0.8 | 345 |
| TCGGCGCCCCGGGCGTGGCCGGCGTGCAGGCCGAC | 3420 | 35 | 0.86 | 346 |
| TCGGCGGACGGACCGCTGCGCAGGGCTT | 3421 | 28 | 0.75 | 347 |
| TCGGTGAGGCCCGGCCAGGC | 3422 | 20 | 0.8 | 348 |
| TCGTGGTCTCGGGCATCAGACCC | 3423 | 23 | 0.65 | 349 |
| TCTTCTAGCACTTGATGTTCCT | 3424 | 22 | 0.41 | 350 |
| TGAAGTGGGTTACTGAGACCCTAAG | 3425 | 25 | 0.48 | 351 |
| TGACCCGGGCCGCCCGCGAGGC | 3426 | 22 | 0.86 | 352 |
| TGAGATAACAAATGTCCCGT | 3427 | 20 | 0.4 | 353 |
| TGATCCATAGCTACA | 3428 | 15 | 0.4 | 354 |
| TGATTTGTGACGGGTAAACAGATAATTAGCCATCC | 3429 | 35 | 0.4 | 355 |
| TGCACCATTCAATCGTTCCTTGTCCTGG | 3430 | 28 | 0.5 | 356 |
| TGCAGGAGGCCGTCCGCCGGACGGGTGGGC | 3431 | 30 | 0.8 | 357 |
| TGCATGATGGTCCGATGCTGCCTGCCTCGGCCTCATCC | 3432 | 38 | 0.63 | 358 |
| TGCCCGATCTGCGCGCCGGAAA | 3433 | 22 | 0.68 | 359 |
| TGCGAGCGCCCCGCGGGGCG | 3434 | 20 | 0.9 | 360 |
| TGCTATGCTGGGCTC | 3435 | 15 | 0.6 | 361 |
| TGCTGCCCGCCGCCCGTAGCCACAGGCC | 3436 | 28 | 0.79 | 362 |
| TGGCGGACTCGGTCCGTATAGT | 3437 | 22 | 0.59 | 363 |
| TGGGGTAACGCGCGT | 3438 | 15 | 0.67 | 364 |
| TGGTGACAGCACCAGGTCATGGCGTTAAGTCAACA | 3439 | 35 | 0.51 | 365 |
| TGGTTAAATGCTATGGAAGCGAACT | 3440 | 25 | 0.4 | 366 |
| TGTGCAACTTCATTGTTAGATA | 3441 | 22 | 0.32 | 367 |
| TGTGGCAATTGTAGCCACCT | 3442 | 20 | 0.5 | 368 |
| TTACAGCCTGGGCGCGTGGACGCAT | 3443 | 25 | 0.64 | 369 |
| TTATGATGTGCGTGGTATGACT | 3444 | 22 | 0.41 | 370 |
| TTCCATAGCTAACGTATTTGGTAATTACATTCAAGAAGTA | 3445 | 40 | 0.3 | 371 |
| TTCCGCCCGCCCGCGCCCGGGCCCAGCCCGCGGCG | 3446 | 35 | 0.91 | 372 |
| TTCCGGTCGGAGCCCTCCGG | 3447 | 20 | 0.75 | 373 |
| TTCTGGAGGCACGCGTGCGTCGCTTGAT | 3448 | 28 | 0.61 | 374 |
| TTCTTGCGGTGCGGACCG | 3449 | 18 | 0.67 | 375 |
| TTGATGTCGTAGGTGATACCGC | 3450 | 22 | 0.5 | 376 |
| TTGCCGCACGCCGAGCCTTCTCTACGGGCCCGGGCGAA | 3451 | 38 | 0.71 | 377 |
| TTGGCCCACCGGCCC | 3452 | 15 | 0.8 | 378 |
| TTGTAGGGGC | 3453 | 10 | 0.6 | 379 |
| TTGTCGTAGTGCACACCAAC | 3454 | 20 | 0.5 | 380 |
| TTTAGTAACAGACACACTAGGGACGGTTATACGAACATTG | 3455 | 40 | 0.4 | 381 |
| TTTAGTTGGGTACAGCTACT | 3456 | 20 | 0.4 | 382 |
| TTTCCGAATTGGAAAGGTTGTCCTCGCG | 3457 | 28 | 0.5 | 383 |
| TTTCCGCTTC | 3458 | 10 | 0.5 | 384 |

[0800] Tables 39 and 40 provide exemplary 5′ RTTs and 3′ RTTs, respectively. Specifically, the 5′ RTTs comprise a region of identity to a sequence on the first strand of the DMPK gene upstream of the second nick site (i.e. the 5′ RTT comprises a region of complementarity to a sequence on the second strand of the DMPK gene that is directly 3′ to nucleotide 4 of the 3′ search target sequence). The 3′ RTTs comprise a region of identity to a sequence on the second strand of the DMPK gene upstream of the first nick site (i.e. the 3′ RTT comprises a region of complementarity to a sequence on the first strand of the DMPK gene that is directly 3′ to nucleotide 4 of the 5′ search target sequence). PEgRNAs comprising these RTTs (the “clean deletion RTTs”), when paired with suitable opposite side PEgRNAs, can result in deletion of the CTG repeats in the DMPK gene without introducing exogenous sequences. Preferrably for clean deletion of the CTG repeats, both a 5′ PEgRNA and a 3′ PEgRNA comprise clean deletion RTTs. Tables 39 and 40 each contains six columns: from left to right, the first column provides the actual sequence of the RTT, the second column provides the SEQ ID NO., the third column provides the RTT length (in these RTTs, also the region of complementarity length between the RTT and the endogenous DMPK sequence), the fourth column provides the GC content of the RTT, the fifth column provides a RTT Pairing number, and the sixth column provides a Pairing spacer number. For each 5′ RTT in Table 39 having a specific Pairing 3′ spacer number, a 5′ PEgRNA comprising the 5′ RTT can be used in a dual prime editing system further comprising a 3′ PEgRNA, wherein the 3′ PEgRNA has the same 3′ spacer number (the 3′ spacer number as specified in Tables 20A-36B). For each 3′ RTT in Table 40 having a specific Pairing 5′ spacer number, a 3′ PEgRNA comprising the 3′ RTT can be used in a dual prime editing system further comprising a 5′ PEgRNA, wherein the 5′ PEgRNA has the same 5′ spacer number (the 3′ spacer number as specified in Tables 1A-19B).

TABLE 39
Exemplary 5′ RTT sequences

| | | | | | Pairing |
|---|---|---|---|---|---|
| | SEQ | | | RTT | 3′ |
| | ID | RTT | RTT GC | Pairing | Spacer |
| Sequence | NO: | length | content | NO: | NO: |
| AATAAATATCCAAACCGCCG | 3459 | 20 | 0.4 | 385 | 5 |
| AGGTCAATAAATATCCAAACCGCCG | 3460 | 25 | 0.44 | 385 | 5 |
| GGACGAGGTCAATAAATATCCAAACCG | 3461 | 30 | 0.5 | 385 | 5 |
| CCG | | | | | |
| CCGAAAAAGCGG | 3462 | 12 | 0.583333333 | 386 | 16 |
| CCCCGAAAAAGCGG | 3463 | 14 | 0.642857143 | 386 | 16 |
| ATCCCCGAAAAAGCGG | 3464 | 16 | 0.5625 | 386 | 16 |
| GGATCCCCGAAAAAGCGG | 3465 | 18 | 0.611111111 | 386 | 16 |
| CGGGATCCCCGAAAAAGCGG | 3466 | 20 | 0.65 | 386 | 16 |
| TCCAAACCGCCG | 3467 | 12 | 0.666666667 | 387 | 5 |
| TATCCAAACCGCCG | 3468 | 14 | 0.571428571 | 387 | 5 |
| AATATCCAAACCGCCG | 3469 | 16 | 0.5 | 387 | 5 |
| TAAATATCCAAACCGCCG | 3470 | 18 | 0.444444444 | 387 | 5 |
| AATAAATATCCAAACCGCCG | 3471 | 20 | 0.4 | 387 | 5 |
| ACGCTCCCCAGA | 3472 | 12 | 0.666666667 | 388 | 10 |
| AGACGCTCCCCAGA | 3473 | 14 | 0.642857143 | 388 | 10 |
| CCAGACGCTCCCCAGA | 3474 | 16 | 0.6875 | 388 | 10 |
| CGCCAGACGCTCCCCAGA | 3475 | 18 | 0.722222222 | 388 | 10 |
| CGCGCCAGACGCTCCCCAGA | 3476 | 20 | 0.75 | 388 | 10 |
| TTTGCGAACCAACGATAGGTGGGGGTG | 3647 | 40 | 0.575 | 396 | 8 |
| CGTGGAGGATGGA | | | | | |
| CATGCACAAGAAAGCTTTGCACTTTGC | 3648 | 40 | 0.45 | 397 | 9 |
| GAACCAACGATAG | | | | | |
| GGCGTCATGCACAAGAAAGCTTTGCAC | 3649 | 40 | 0.5 | 398 | 3 |
| TTTGCGAACCAAC | | | | | |
| CCGAGTAAGCAGGCAGAGATCGCGCCA | 3650 | 40 | 0.65 | 388 | 10 |
| GACGCTCCCCAGA | | | | | |
| CCCGAAAAAGCGGGTTTGGCAAAAGCA | 3651 | 40 | 0.475 | 399 | 11 |
| AATTTCCCGAGTA | | | | | |
| CGCAAGTGAGGAGGGGGGCGCGGGAT | 3652 | 40 | 0.7 | 386 | 16 |
| CCCCGAAAAAGCGG | | | | | |
| AGCAGCGCAAGTGAGGAGGGGGGCGC | 3653 | 40 | 0.675 | 400 | 4 |
| GGGATCCCCGAAAA | | | | | |
| GCGGAGCCGGCTGGGGCTCCGAGAGCA | 3654 | 40 | 0.725 | 401 | 12 |
| GCGCAAGTGAGGA | | | | | |
| GGTCAATAAATATCCAAACCGCCGAAG | 3655 | 40 | 0.6 | 402 | 17 |
| CGGGCGGAGCCGG | | | | | |
| GCGAGTCGGAGGACGAGGTCAATAAAT | 3656 | 40 | 0.55 | 385 | 5 |
| ATCCAAACCGCCG | | | | | |
| GGGTTGTTGGGGGTCCTGTAGCCTGTC | 3657 | 40 | 0.65 | 403 | 13 |
| AGCGAGTCGGAGG | | | | | |
| CGTGGATTGGGGTTGTTGGGGGTCCTG | 3658 | 40 | 0.625 | 404 | 14 |
| TAGCCTGTCAGCG | | | | | |
| TTCCCAGGCCTGCAGTTTGCCCATCCAC | 3659 | 40 | 0.625 | 405 | 6 |
| GTCAGGGCCTCA | | | | | |
| GGCTTGCTGCCTTCCCAGGCCTGCAGTT | 3660 | 40 | 0.65 | 406 | 1 |
| TGCCCATCCACG | | | | | |
| GCGTGGAGGATGGAACACGGACGGCCC | 3661 | 40 | 0.675 | 407 | 15 |
| GGCTTGCTGCCTT | | | | | |
| CAACGATAGGTGGGGGTGCGTGGAGGA | 3662 | 40 | 0.625 | 408 | 7 |
| TGGAACACGGACG | | | | | |
| CGAACCAACGATAGGTGGGGGTGCGTG | 3663 | 40 | 0.6 | 409 | 2 |
| GAGGATGGAACAC | | | | | |

TABLE 40
Exemplary 3′ RTT sequences

| | | | | | Pairing |
|---|---|---|---|---|---|
| | | | | RTT | 5′ |
| | SEQ ID | RTT | RTT GC | Pairing | Spacer |
| Sequence | NO: | length | content | NO: | NO: |
| CCCTAGAACTGTCTTCGACT | 3477 | 20 | 0.5 | 389 | 6 |
| CTGAACCCTAGAACTGTCTTCGACT | 3478 | 25 | 0.48 | 389 | 6 |
| GCTCCCTGAACCCTAGAACTGTCTTC | 3479 | 30 | 0.533333333 | 389 | 6 |
| GACT | | | | | |
| AAGACTGAGTGC | 3480 | 12 | 0.5 | 390 | 5 |
| GGAAGACTGAGTGC | 3481 | 14 | 0.571428571 | 390 | 5 |
| TTGGAAGACTGAGTGC | 3482 | 16 | 0.5 | 390 | 5 |
| CGTTGGAAGACTGAGTGC | 3483 | 18 | 0.555555556 | 390 | 5 |
| CCCGTTGGAAGACTGAGTGC | 3484 | 20 | 0.6 | 390 | 5 |
| CCAGTCCTGTGA | 3485 | 12 | 0.583333333 | 391 | 11 |
| CTCCAGTCCTGTGA | 3486 | 14 | 0.571428571 | 391 | 11 |
| AGCTCCAGTCCTGTGA | 3487 | 16 | 0.5625 | 391 | 11 |
| CCAGCTCCAGTCCTGTGA | 3488 | 18 | 0.611111111 | 391 | 11 |
| GCCCAGCTCCAGTCCTGTGA | 3489 | 20 | 0.65 | 391 | 11 |
| CGCGGCCGGCGA | 3490 | 12 | 0.916666667 | 392 | 18 |
| TCCGCGGCCGGCGA | 3491 | 14 | 0.857142857 | 392 | 18 |
| GGTCCGCGGCCGGCGA | 3492 | 16 | 0.875 | 392 | 18 |
| CGGGTCCGCGGCCGGCGA | 3493 | 18 | 0.888888889 | 392 | 18 |
| GCCGGGTCCGCGGCCGGCGA | 3494 | 20 | 0.9 | 392 | 18 |
| GAGCCGCCCGCGCTCCCTGAACCCTA | 3664 | 40 | 0.65 | 410 | 7 |
| GAACTGTCTTCGAC | | | | | |
| AACTGTCTTCGACTCCGGGGCCCCGT | 3665 | 40 | 0.6 | 411 | 8 |
| TGGAAGACTGAGTG | | | | | |
| CTTCGACTCCGGGGCCCCGTTGGAAG | 3666 | 40 | 0.7 | 412 | 9 |
| ACTGAGTGCCCGGG | | | | | |
| GAAGCCGCGCCCACCGCCTGCCAGTT | 3667 | 40 | 0.7 | 413 | 10 |
| CACAACCGCTCCGA | | | | | |
| CGCTCCGAGCGTGGGTCTCCGCCCAG | 3668 | 40 | 0.7 | 391 | 11 |
| CTCCAGTCCTGTGA | | | | | |
| TGTGATCCGGGCCCGCCCCCTAGCGG | 3669 | 40 | 0.8 | 414 | 3 |
| CCGGGGAGGGAGGG | | | | | |
| GGGGAGGGAGGGGCCGGGTCCGCGG | 3670 | 40 | 0.85 | 415 | 12 |
| CCGGCGAACGGGGCT | | | | | |
| TGGTGGCCCACGCCGGCCAACTCACC | 3671 | 40 | 0.75 | 416 | 13 |
| GCAGTCTGGCGCCG | | | | | |
| CGCTCCCTGAACCCTAGAACTGTCTTC | 3672 | 40 | 0.65 | 417 | 14 |
| GACTCCGGGGCCC | | | | | |
| CGCCCAGCTCCAGTCCTGTGATCCGG | 3673 | 40 | 0.75 | 418 | 15 |
| GCCCGCCCCCTAGC | | | | | |
| CAGTCCTGTGATCCGGGCCCGCCCCC | 3674 | 40 | 0.775 | 419 | 16 |
| TAGCGGCCGGGGAG | | | | | |
| CCCGCCCCCTAGCGGCCGGGGAGGGA | 3675 | 40 | 0.875 | 420 | 17 |
| GGGGCCGGGTCCGC | | | | | |
| TAGCGGCCGGGGAGGGAGGGGCCGG | 3676 | 40 | 0.85 | 392 | 18 |
| GTCCGCGGCCGGCGA | | | | | |
| CGGGTCCGCGGCCGGCGAACGGGGCT | 3677 | 40 | 0.75 | 421 | 19 |
| CGAAGGGTCCTTGT | | | | | |
| GGGAGGGAGGGGCCGGGTCCGCGGC | 3678 | 40 | 0.8 | 422 | 2 |
| CGGCGAACGGGGCTC | | | | | |
| ACTGTCTTCGACTCCGGGGCCCCGTT | 3679 | 40 | 0.625 | 390 | 5 |
| GGAAGACTGAGTGC | | | | | |
| AGCCGCCCGCGCTCCCTGAACCCTAG | 3680 | 40 | 0.625 | 389 | 6 |
| AACTGTCTTCGACT | | | | | |
| TCTCCGCCCAGCTCCAGTCCTGTGATC | 3681 | 40 | 0.75 | 423 | 4 |
| CGGGCCCGCCCCC | | | | | |
| GGGAGGGAGGGGCCGGGTCCGCGGC | 3682 | 40 | 0.85 | 424 | 1 |
| CGGCGAACGGGGCTC | | | | | |

[0801] Tables 41 and 42 provide exemplary 5′ RTTs and 3′ RTTs, respectively, wherein the 5′ RTT and the 3′ RTT each comprises a region of complementarity to each other. The RTTs in Tables 41 and 42 comprise endogenous DMPK sequences that flank the CTG repeats. In some cases, the RTTs also include reduced number (5) of CTG repeats. Tables 41 and 42 each includes three columns: from left to right, the first column provides the SEQ ID NO, the second column provides the actual sequence of the RTT, and the third column provides a RTT Pairing number. For each 5′ RTT in Table 41 having a specific RTT Paring number, a 5′ PEgRNA comprising the 5′ RTT can be used in a dual prime editing system further comprising a 3′ PEgRNA, wherein the 3′ PEgRNA has the same RTT Paring number as assigned in Table 42.

TABLE 41
Exemplary 5′ RTTs

| SEQ | | RTT |
|---|---|---|
| ID | | Pairing |
| NO: | Sequence | No. |
| 3537 | ACACGGACGGCCCGGCTTGCTGCCTTCCCAGGCCTGCAGTTTGCCCATCCACGTCAGGGCCTC | 393 |
| | AGCCTGGCCGAAAGAAAGAAATGGTCTGTGATCCCCCCAGCAGCAGCAGCAGCATTCCCGGC | |
| | TACAAGGACCCTTCGAGCCCCGTTCGCCGGCCGCGGACCCGGCCCCTCCCTCCCCGGCCGCTA | |
| | GGGGGCGGGCCCGGATCACAGGACTGG | |
| 3538 | CCCGGCTTGCTGCCTTCCCAGGCCTGCAGTTTGCCCATCCACGTCAGGGCCTCAGCCTGGCCG | 393 |
| | AAAGAAAGAAATGGTCTGTGATCCCCCCAGCAGCAGCAGCAGCATTCCCGGCTACAAGGACC | |
| | CTTCGAGCCCCGTTCGCCGGCCGCGGACCCGGCCCCTCCCTCCCCGGCCGCTAGGGGGCGGG | |
| | CCCGGATC | |
| 3539 | TGCCTTCCCAGGCCTGCAGTTTGCCCATCCACGTCAGGGCCTCAGCCTGGCCGAAAGAAAGA | 393 |
| | AATGGTCTGTGATCCCCCCAGCAGCAGCAGCAGCATTCCCGGCTACAAGGACCCTTCGAGCC | |
| | CCGTTCGCCGGCCGCGGACCCGGCCCCTCCCTCCCCGGCCGCTAGGGGGCG | |
| 3540 | GGCCTGCAGTTTGCCCATCCACGTCAGGGCCTCAGCCTGGCCGAAAGAAAGAAATGGTCTGT | 393 |
| | GATCCCCCCAGCAGCAGCAGCAGCATTCCCGGCTACAAGGACCCTTCGAGCCCCGTTCGCCG | |
| | GCCGCGGACCCGGCCCCTCCCTCCCCGGCCG | |
| 3541 | TTGCCCATCCACGTCAGGGCCTCAGCCTGGCCGAAAGAAAGAAATGGTCTGTGATCCCCCCA | 393 |
| | GCAGCAGCAGCAGCATTCCCGGCTACAAGGACCCTTCGAGCCCCGTTCGCCGGCCGCGGACC | |
| | CGGCCCCTCCC | |
| 3542 | ACGTCAGGGCCTCAGCCTGGCCGAAAGAAAGAAATGGTCTGTGATCCCCCCAGCAGCAGCAG | 393 |
| | CAGCATTCCCGGCTACAAGGACCCTTCGAGCCCCGTTCGCCGGCCGCGGACCC | |
| 3543 | CTCAGCCTGGCCGAAAGAAAGAAATGGTCTGTGATCCCCCCAGCAGCAGCAGCAGCATTCCC | 393 |
| | GGCTACAAGGACCCTTCGAGCCCCGTTCGCCGG | |
| 3544 | CCGAAAGAAAGAAATGGTCTGTGATCCCCCCAGCAGCAGCAGCAGCATTCCCGGCTACAAGG | 393 |
| | ACCCTTCGAGCCC | |
| 3545 | GAAATGGTCTGTGATCCCCCCAGCAGCAGCAGCAGCATTCCCGGCTACAAGGACC | 393 |
| 3546 | GTGATCCCCCCAGCAGCAGCAGCAGCATTCCCGGC | 393 |
| 3547 | ACACGGACGGCCCGGCTTGCTGCCTTCCCAGGCCTGCAGTTTGCCCATCCACGTCAGGGCCTC | 394 |
| | AGCCTGGCCGAAAGAAAGAAATGGTCTGTGATCCCCCCATTCCCGGCTACAAGGACCCTTCG | |
| | AGCCCCGTTCGCCGGCCGCGGACCCGGCCCCTCCCTCCCCGGCCGCTAGGGGGCGGGCCCGG | |
| | ATCACAGGACTGG | |
| 3548 | CCCGGCTTGCTGCCTTCCCAGGCCTGCAGTTTGCCCATCCACGTCAGGGCCTCAGCCTGGCCG | 394 |
| | AAAGAAAGAAATGGTCTGTGATCCCCCCATTCCCGGCTACAAGGACCCTTCGAGCCCCGTTC | |
| | GCCGGCCGCGGACCCGGCCCCTCCCTCCCCGGCCGCTAGGGGGCGGGCCCGGATC | |
| 3549 | TGCCTTCCCAGGCCTGCAGTTTGCCCATCCACGTCAGGGCCTCAGCCTGGCCGAAAGAAAGA | 394 |
| | AATGGTCTGTGATCCCCCCATTCCCGGCTACAAGGACCCTTCGAGCCCCGTTCGCCGGCCGCG | |
| | GACCCGGCCCCTCCCTCCCCGGCCGCTAGGGGGCG | |
| 3550 | GGCCTGCAGTTTGCCCATCCACGTCAGGGCCTCAGCCTGGCCGAAAGAAAGAAATGGTCTGT | 394 |
| | GATCCCCCCATTCCCGGCTACAAGGACCCTTCGAGCCCCGTTCGCCGGCCGCGGACCCGGCCC | |
| | CTCCCTCCCCGGCCG | |
| 3551 | TTGCCCATCCACGTCAGGGCCTCAGCCTGGCCGAAAGAAAGAAATGGTCTGTGATCCCCCCA | 394 |
| | TTCCCGGCTACAAGGACCCTTCGAGCCCCGTTCGCCGGCCGCGGACCCGGCCCCTCCC | |
| 3552 | ACGTCAGGGCCTCAGCCTGGCCGAAAGAAAGAAATGGTCTGTGATCCCCCCATTCCCGGCTA | 394 |
| | CAAGGACCCTTCGAGCCCCGTTCGCCGGCCGCGGACCC | |
| 3553 | CTCAGCCTGGCCGAAAGAAAGAAATGGTCTGTGATCCCCCCATTCCCGGCTACAAGGACCCT | 394 |
| | TCGAGCCCCGTTCGCCGG | |
| 3554 | CCGAAAGAAAGAAATGGTCTGTGATCCCCCCATTCCCGGCTACAAGGACCCTTCGAGCCC | 394 |
| 3555 | GAAATGGTCTGTGATCCCCCCATTCCCGGCTACAAGGACC | 394 |
| 3556 | GTGATCCCCCCATTCCCGGC | 394 |
| 3557 | ACACGGACGGCCCGGCTTGCTGCCTTCCCAGGCCTGCAGTTTGCCCATCCACGTCAGGGCCTC | 396 |
| | AGCCTGGCCGAAAGAAAGAAATGGTCTGTGATCCCCC | |
| 3558 | CCCGGCTTGCTGCCTTCCCAGGCCTGCAGTTTGCCCATCCACGTCAGGGCCTCAGCCTGGCCG | 396 |
| | AAAGAAAGAAATGGTCTGTGATCCCCC | |
| 3559 | TGCCTTCCCAGGCCTGCAGTTTGCCCATCCACGTCAGGGCCTCAGCCTGGCCGAAAGAAAGA | 396 |
| | AATGGTCTGTGATCCCCC | |
| 3560 | GGCCTGCAGTTTGCCCATCCACGTCAGGGCCTCAGCCTGGCCGAAAGAAAGAAATGGTCTGT | 396 |
| | GATCCCCC | |
| 3561 | TTGCCCATCCACGTCAGGGCCTCAGCCTGGCCGAAAGAAAGAAATGGTCTGTGATCCCCC | 396 |
| 3562 | ACGTCAGGGCCTCAGCCTGGCCGAAAGAAAGAAATGGTCTGTGATCCCCC | 396 |
| 3563 | CTCAGCCTGGCCGAAAGAAAGAAATGGTCTGTGATCCCCC | 396 |
| 3564 | CCGAAAGAAAGAAATGGTCTGTGATCCCCC | 396 |
| 3565 | GAAATGGTCTGTGATCCCCC | 396 |
| 3566 | GTGATCCCCC | 396 |
| 3567 | CATTCCCGGCTACAAGGACCCTTCGAGCCCCGTTCGCCGGCCGCGGACCCGGCCCCTCCCTCC | 395 |
| | CCGGCCGCTAGGGGGCGGGCCCGGATCACAGGACTGG | |
| 3568 | CATTCCCGGCTACAAGGACCCTTCGAGCCCCGTTCGCCGGCCGCGGACCCGGCCCCTCCCTCC | 395 |
| | CCGGCCGCTAGGGGGCGGGCCCGGATC | |
| 3569 | CATTCCCGGCTACAAGGACCCTTCGAGCCCCGTTCGCCGGCCGCGGACCCGGCCCCTCCCTCC | 395 |
| | CCGGCCGCTAGGGGGCG | |
| 3570 | CATTCCCGGCTACAAGGACCCTTCGAGCCCCGTTCGCCGGCCGCGGACCCGGCCCCTCCCTCC | 395 |
| | CCGGCCG | |
| 3571 | CATTCCCGGCTACAAGGACCCTTCGAGCCCCGTTCGCCGGCCGCGGACCCGGCCCCTCCC | 395 |
| 3572 | CATTCCCGGCTACAAGGACCCTTCGAGCCCCGTTCGCCGGCCGCGGACCC | 395 |
| 3573 | CATTCCCGGCTACAAGGACCCTTCGAGCCCCGTTCGCCGG | 395 |
| 3574 | CATTCCCGGCTACAAGGACCCTTCGAGCCC | 395 |
| 3575 | CATTCCCGGCTACAAGGACC | 395 |
| 3576 | CAGCATTCCCGGC | 395 |

TABLE 42
3′ RTTs

| | | RTT |
|---|---|---|
| SEQ ID | | Pairing |
| NO: | Sequence | No. |
| 3497 | CCAGTCCTGTGATCCGGGCCCGCCCCCTAGCGGCCGGGGAGGGAGGGGCCGGGTCCGCGGC | 393 |
| | CGGCGAACGGGGCTCGAAGGGTCCTTGTAGCCGGGAATGCTGCTGCTGCTGCTGGGGGGAT | |
| | CACAGACCATTTCTTTCTTTCGGCCAGGCTGAGGCCCTGACGTGGATGGGCAAACTGCAGGC | |
| | CTGGGAAGGCAGCAAGCCGGGCCGTCCGTGT | |
| 3498 | GATCCGGGCCCGCCCCCTAGCGGCCGGGGAGGGAGGGGCCGGGTCCGCGGCCGGCGAACGG | 393 |
| | GGCTCGAAGGGTCCTTGTAGCCGGGAATGCTGCTGCTGCTGCTGGGGGGATCACAGACCATT | |
| | TCTTTCTTTCGGCCAGGCTGAGGCCCTGACGTGGATGGGCAAACTGCAGGCCTGGGAAGGCA | |
| | GCAAGCCGGG | |
| 3499 | CGCCCCCTAGCGGCCGGGGAGGGAGGGGCCGGGTCCGCGGCCGGCGAACGGGGCTCGAAG | 393 |
| | GGTCCTTGTAGCCGGGAATGCTGCTGCTGCTGCTGGGGGGATCACAGACCATTTCTTTCTTTC | |
| | GGCCAGGCTGAGGCCCTGACGTGGATGGGCAAACTGCAGGCCTGGGAAGGCA | |
| 3500 | CGGCCGGGGAGGGAGGGGCCGGGTCCGCGGCCGGCGAACGGGGCTCGAAGGGTCCTTGTAG | 393 |
| | CCGGGAATGCTGCTGCTGCTGCTGGGGGGATCACAGACCATTTCTTTCTTTCGGCCAGGCTG | |
| | AGGCCCTGACGTGGATGGGCAAACTGCAGGCC | |
| 3501 | GGGAGGGGCCGGGTCCGCGGCCGGCGAACGGGGCTCGAAGGGTCCTTGTAGCCGGGAATGC | 393 |
| | TGCTGCTGCTGCTGGGGGGATCACAGACCATTTCTTTCTTTCGGCCAGGCTGAGGCCCTGAC | |
| | GTGGATGGGCAA | |
| 3502 | GGGTCCGCGGCCGGCGAACGGGGCTCGAAGGGTCCTTGTAGCCGGGAATGCTGCTGCTGCT | 393 |
| | GCTGGGGGGATCACAGACCATTTCTTTCTTTCGGCCAGGCTGAGGCCCTGACGT | |
| 3503 | CCGGCGAACGGGGCTCGAAGGGTCCTTGTAGCCGGGAATGCTGCTGCTGCTGCTGGGGGGA | 393 |
| | TCACAGACCATTTCTTTCTTTCGGCCAGGCTGAG | |
| 3504 | GGGCTCGAAGGGTCCTTGTAGCCGGGAATGCTGCTGCTGCTGCTGGGGGGATCACAGACCAT | 393 |
| | TTCTTTCTTTCGG | |
| 3505 | GGTCCTTGTAGCCGGGAATGCTGCTGCTGCTGCTGGGGGGATCACAGACCATTTC | 393 |
| 3506 | GCCGGGAATGCTGCTGCTGCTGCTGGGGGGATCAC | 393 |
| 3507 | CCAGTCCTGTGATCCGGGCCCGCCCCCTAGCGGCCGGGGAGGGAGGGGCCGGGTCCGCGGC | 394 |
| | CGGCGAACGGGGCTCGAAGGGTCCTTGTAGCCGGGAATGGGGGGATCACAGACCATTTCTT | |
| | TCTTTCGGCCAGGCTGAGGCCCTGACGTGGATGGGCAAACTGCAGGCCTGGGAAGGCAGCA | |
| | AGCCGGGCCGTCCGTGT | |
| 3508 | GATCCGGGCCCGCCCCCTAGCGGCCGGGGAGGGAGGGGCCGGGTCCGCGGCCGGCGAACGG | 394 |
| | GGCTCGAAGGGTCCTTGTAGCCGGGAATGGGGGGATCACAGACCATTTCTTTCTTTCGGCCA | |
| | GGCTGAGGCCCTGACGTGGATGGGCAAACTGCAGGCCTGGGAAGGCAGCAAGCCGGG | |
| 3509 | CGCCCCCTAGCGGCCGGGGAGGGAGGGGCCGGGTCCGCGGCCGGCGAACGGGGCTCGAAG | 394 |
| | GGTCCTTGTAGCCGGGAATGGGGGGATCACAGACCATTTCTTTCTTTCGGCCAGGCTGAGGC | |
| | CCTGACGTGGATGGGCAAACTGCAGGCCTGGGAAGGCA | |
| 3510 | CGGCCGGGGAGGGAGGGGCCGGGTCCGCGGCCGGCGAACGGGGCTCGAAGGGTCCTTGTAG | 394 |
| | CCGGGAATGGGGGGATCACAGACCATTTCTTTCTTTCGGCCAGGCTGAGGCCCTGACGTGGA | |
| | TGGGCAAACTGCAGGCC | |
| 3511 | GGGAGGGGCCGGGTCCGCGGCCGGCGAACGGGGCTCGAAGGGTCCTTGTAGCCGGGAATGG | 394 |
| | GGGGATCACAGACCATTTCTTTCTTTCGGCCAGGCTGAGGCCCTGACGTGGATGGGCAA | |
| 3512 | GGGTCCGCGGCCGGCGAACGGGGCTCGAAGGGTCCTTGTAGCCGGGAATGGGGGGATCACA | 394 |
| | GACCATTTCTTTCTTTCGGCCAGGCTGAGGCCCTGACGT | |
| 3513 | CCGGCGAACGGGGCTCGAAGGGTCCTTGTAGCCGGGAATGGGGGGATCACAGACCATTTCT | 394 |
| | TTCTTTCGGCCAGGCTGAG | |
| 3514 | GGGCTCGAAGGGTCCTTGTAGCCGGGAATGGGGGGATCACAGACCATTTCTTTCTTTCGG | 394 |
| 3515 | GGTCCTTGTAGCCGGGAATGGGGGGATCACAGACCATTTC | 394 |
| 3516 | GCCGGGAATGGGGGGATCAC | 394 |
| 3517 | GCCGGGAATG | 395 |
| 3518 | GGTCCTTGTAGCCGGGAATG | 395 |
| 3519 | CCAGTCCTGTGATCCGGGCCCGCCCCCTAGCGGCCGGGGAGGGAGGGGCCGGGTCCGCGGC | 395 |
| | CGGCGAACGGGGCTCGAAGGGTCCTTGTAGCCGGGAATG | |
| 3520 | GATCCGGGCCCGCCCCCTAGCGGCCGGGGAGGGAGGGGCCGGGTCCGCGGCCGGCGAACGG | 395 |
| | GGCTCGAAGGGTCCTTGTAGCCGGGAATG | |
| 3521 | CGCCCCCTAGCGGCCGGGGAGGGAGGGGCCGGGTCCGCGGCCGGCGAACGGGGCTCGAAG | 395 |
| | GGTCCTTGTAGCCGGGAATG | |
| 3522 | CGGCCGGGGAGGGAGGGGCCGGGTCCGCGGCCGGCGAACGGGGCTCGAAGGGTCCTTGTAG | 395 |
| | CCGGGAATG | |
| 3523 | GGGAGGGGCCGGGTCCGCGGCCGGCGAACGGGGCTCGAAGGGTCCTTGTAGCCGGGAATG | 395 |
| 3524 | GGGTCCGCGGCCGGCGAACGGGGCTCGAAGGGTCCTTGTAGCCGGGAATG | 395 |
| 3525 | CCGGCGAACGGGGCTCGAAGGGTCCTTGTAGCCGGGAATG | 395 |
| 3526 | GGGCTCGAAGGGTCCTTGTAGCCGGGAATG | 395 |
| 3527 | GGGGGATCACAGACCATTTCTTTCTTTCGGCCAGGCTGAGGCCCTGACGTGGATGGGCAAAC | 396 |
| | TGCAGGCCTGGGAAGGCAGCAAGCCGGGCCGTCCGTGT | |
| 3528 | GGGGGATCACAGACCATTTCTTTCTTTCGGCCAGGCTGAGGCCCTGACGTGGATGGGCAAAC | 396 |
| | TGCAGGCCTGGGAAGGCAGCAAGCCGGG | |
| 3529 | GGGGGATCACAGACCATTTCTTTCTTTCGGCCAGGCTGAGGCCCTGACGTGGATGGGCAAAC | 396 |
| | TGCAGGCCTGGGAAGGCA | |
| 3530 | GGGGGATCACAGACCATTTCTTTCTTTCGGCCAGGCTGAGGCCCTGACGTGGATGGGCAAAC | 396 |
| | TGCAGGCC | |
| 3531 | GGGGGATCACAGACCATTTCTTTCTTTCGGCCAGGCTGAGGCCCTGACGTGGATGGGCAA | 396 |
| 3532 | GGGGGATCACAGACCATTTCTTTCTTTCGGCCAGGCTGAGGCCCTGACGT | 396 |
| 3533 | GGGGGATCACAGACCATTTCTTTGCCGGGAATGCTGCTGCTGCTGCTGGGGGGATCACCTTT | 396 |
| | CGGCCAGGCTGAG | |
| 3534 | GGGGGATCACAGACCATTTCTTTCTTTCGG | 396 |
| 3535 | GGGGGATCACAGACCATTTC | 396 |
| 3536 | GGGGGATCAC | 396 |

[0802] The 5′ and 3′ PEgRNAs as exemplified and/or comprise components provided in Tables 1A-42 can comprise, from 5′ to 3′, the spacer, the gRNA core, the edit template, and the PBS. The 3′ end of the edit template can be contiguous with the 5′ end of the PBS. The PEgRNA can comprise multiple RNA molecules (e.g., a crRNA containing the PEgRNA spacer and a tracrRNA containing the extension arm) or can be a single gRNA molecule. Any PEgRNA exemplified in Tables 1A-42 may comprise, or further comprise, a 3′ motif at the 3′ end of the extension arm, for example, a hairpin-forming motif or a series of 1, 2, 3, 4, 5, 6, 7 or more U nucleotides. In some embodiments, the PEgRNA comprises 4 U nucleotides at its 3′ end. Without being bound by theory, such 3′ motifs are believed to increase PEgRNA stability. The PEgRNA may alternatively or additionally comprise one or more chemical modifications, such as phosphorothioate (PS) bond(s), 2′-O-methylated (2′-Ome) nucleotides, or a combination thereof. In some embodiments, the PEgRNA comprise 3′ mN*mN*mN*N and 5′mN*mN*mN*modifications, where m indicates that the nucleotide contains a 2′-O-Me modification and a * indicates the presence of a phosphorothioate bond. PEgRNA sequences exemplified in Tables 1-84 may alternatively be adapted for expression from a DNA template, for example, by including a 5′ terminal G if the spacer of the PEgRNA begins with another nucleotide, by including 6 or 7 U nucleotides at the 3′ end of the extension arm, or both. Such expression-adapted sequences may further comprise a hairpin-forming motif between the PBS and the 3′ terminal U series. In some embodiments, a prime editing system comprises one or more polynucleotides encoding one or more prime editor polypeptides, wherein activity of the prime editing system may be temporally regulated by controlling the timing in which the vectors are delivered. For example, in some embodiments, a polynucleotide encoding the prime editor and a polynucleotide encoding a PEgRNA or both PEgRNAs may be delivered simultaneously. For example, in some embodiments, a polynucleotide encoding the prime editor and a polynucleotide encoding a PEgRNA or both PEgRNAs may be delivered sequentially.

[0803] In some embodiments, a polynucleotide encoding a component of a prime editing system may further comprise an element that is capable of modifying the intracellular half-life of the polynucleotide and/or modulating translational control. In some embodiments, the polynucleotide is a RNA, for example, an mRNA. In some embodiments, the half-life of the polynucleotide, e.g., the RNA may be increased. In some embodiments, the half-life of the polynucleotide, e.g., the RNA may be decreased. In some embodiments, the element may be capable of increasing the stability of the polynucleotide, e.g., the RNA. In some embodiments, the element may be capable of decreasing the stability of the polynucleotide, e.g., the RNA. In some embodiments, the element may be within the 3′ UTR of the RNA. In some embodiments, the element may include a polyadenylation signal (PA). In some embodiments, the element may include a cap, e.g., an upstream mRNA or PEgRNA end. In some embodiments, the RNA may comprise no PA such that it is subject to quicker degradation in the cell after transcription.

[0804] In some embodiments, the element may include at least one AU-rich element (ARE). The AREs may be bound by ARE binding proteins (ARE-BPs) in a manner that is dependent upon tissue type, cell type, timing, cellular localization, and environment. In some embodiments the destabilizing element may promote RNA decay, affect RNA stability, or activate translation. In some embodiments, the ARE may comprise 50 to 150 nucleotides in length. In some embodiments, the ARE may comprise at least one copy of the sequence AUUUA. In some embodiments, at least one ARE may be added to the 3′ UTR of the RNA. In some embodiments, the element may be a Woodchuck Hepatitis Virus Posttranscriptional Regulatory Element (WPRE). In further embodiments, the element is a modified and/or truncated WPRE sequence that is capable of enhancing expression from the transcript. In some embodiments, the WPRE or equivalent may be added to the 3′ UTR of the RNA. In some embodiments, the element may be selected from other RNA sequence motifs that are enriched in either fast- or slow-decaying transcripts. In some embodiments, the polynucleotide, e.g., a vector, encoding the PE or the PEgRNA may be self-destroyed via cleavage of a target sequence present on the polynucleotide, e.g., a vector. The cleavage may prevent continued transcription of a PE or a PEgRNA.

[0805] Polynucleotides encoding prime editing composition components can be DNA, RNA, or any combination thereof. In some embodiments, a polynucleotide encoding a prime editing composition component is an expression construct. In some embodiments, a polynucleotide encoding a prime editing composition component is a vector. In some embodiments, the vector is a DNA vector. In some embodiments, the vector is a plasmid. In some embodiments, the vector is a virus vector, e.g., a retroviral vector, adenoviral vector, lentiviral vector, herpesvirus vector, or an adeno-associated virus vector (AAV).

[0806] In some embodiments, polynucleotides encoding polypeptide components of a prime editing composition are codon optimized by replacing at least one codon (e.g., about or more than about 1, 2, 3, 4, 5, 10, 15, 20, 25, 50, or more codons) of the native sequence with codons that are more frequently or most frequently used in the genes of that host cell while maintaining the native amino acid sequence. In some embodiments, a polynucleotide encoding a polypeptide component of a prime editing composition are operably linked to one or more expression regulatory elements, for example, a promoter, a 3′ UTR, a 5′ UTR, or any combination thereof. In some embodiments, a polynucleotide encoding a prime editing composition component is a messenger RNA (mRNA). In some embodiments, the mRNA comprises a Cap at the 5′ end and/or a poly A tail at the 3′ end.

### Pharmaceutical Compositions

[0807] Disclosed herein are pharmaceutical compositions comprising any of the prime editing composition components, for example, prime editors, fusion proteins, polynucleotides encoding prime editor polypeptides, PEgRNAs, and/or prime editing complexes described herein.

[0808] The term “pharmaceutical composition”, as used herein, refers to a composition formulated for pharmaceutical use. In some embodiments, the pharmaceutical composition further comprises a pharmaceutically acceptable carrier. In some embodiments, the pharmaceutical composition comprises additional agents, e.g., for specific delivery, increasing half-life, or other therapeutic compounds.

[0809] In some embodiments, a pharmaceutically-acceptable carrier comprises any vehicle, such as a liquid or solid filler, diluent, excipient, manufacturing aid (e.g., lubricant, talc magnesium, calcium or zinc stearate, or steric acid), or solvent encapsulating material, involved in carrying or transporting the compound from one site (e.g., the delivery site) of the body, to another site (e.g., organ, tissue or portion of the body). A pharmaceutically acceptable carrier is “acceptable” in the sense of being compatible with the other ingredients of the formulation and not injurious to the tissue of the subject (e.g., physiologically compatible, sterile, physiologic pH, etc.)

[0810] Formulations of the pharmaceutical compositions described herein can be prepared by any method known or hereafter developed in the art of pharmacology. In general, such preparatory methods include the step of bringing the active ingredient(s) into association with an excipient and/or one or more other accessory ingredients, and then, if necessary and/or desirable, shaping and/or packaging the product into a desired single- or multi-dose unit. Pharmaceutical formulations can additionally comprise a pharmaceutically acceptable excipient, which, as used herein, includes any and all solvents, dispersion media, diluents, or other liquid vehicles, dispersion or suspension aids, surface active agents, isotonic agents, thickening or emulsifying agents, preservatives, solid binders, lubricants and the like, as suited to the particular dosage form desired.

### Methods of Editing

[0811] The methods and compositions disclosed herein can be used to edit a target gene of interest by dual prime editing.

[0812] In some embodiments, the dual prime editing method comprises contacting a target gene, e.g., a DMPK gene, with a first PEgRNA, a second PEgRNA and a prime editor (PE) polypeptide described herein. In some embodiments, the target gene is double stranded, and comprises two strands of DNA complementary to each other. In some embodiments, the contacting with the two PEgRNAs and the contacting with a prime editor are performed sequentially. In some embodiments, the contacting with a prime editor is performed after the contacting with the two PEgRNAs. In some embodiments, the contacting with the two PEgRNAs is performed after the contacting with a prime editor. In some embodiments, the contacting with the two PEgRNAs is performed simultaneously either prior to or after contacting with a prime editor. In some embodiments, the contacting with the two PEgRNAs is performed sequentially either prior to or after contacting with a prime editor. In some embodiments, the contacting with the two PEgRNAs, and the contacting with a prime editor are performed simultaneously. In some embodiments, the two PEgRNAs and the prime editor are associated in complexes prior to contacting a target gene.

[0813] In some embodiments, contacting the target gene with the prime editing composition results in binding of the first PEgRNA to a first strand of the target gene, e.g., a DMPK gene. In some embodiments, contacting the target gene with the prime editing composition results in binding of the second PEgRNA to a second strand of the target gene, e.g., a DMPK gene. In some embodiments, contacting the target gene with the prime editing composition results in binding of the first PEgRNA to a first strand of the target gene and binding of the second PEgRNA to a second strand of the target gene, e.g., a DMPK gene. In some embodiments, contacting the target gene with the prime editing composition results in binding of the first PEgRNA to a first search target sequence on the first strand of the target gene upon contacting with the first PEgRNA. In some embodiments, contacting the target gene with the prime editing composition results in binding of the second PEgRNA to a second search target sequence on the second strand of the target gene upon contacting with the second PEgRNA. In some embodiments, contacting the target gene with the prime editing composition results in binding of the first PEgRNA to a first search target sequence on the first strand of the target gene upon contacting with the first PEgRNA and binding of the second PEgRNA to a second search target sequence on the second strand of the target gene upon contacting with the second PEgRNA. In some embodiments, contacting the target gene with the prime editing composition results in binding of a first spacer of the first PEgRNA to a first search target sequence on the first strand of the target gene upon said contacting of the first PEgRNA. In some embodiments, contacting the target gene with the prime editing composition results in binding of a second spacer of the second PEgRNA to a second search target sequence on the second strand of the target gene upon said contacting of the second PEgRNA. In some embodiments, contacting the target gene with the prime editing composition results in binding of a first spacer of the first PEgRNA to a first search target sequence on the first strand of the target gene upon said contacting of the first PEgRNA and binding of a second spacer of the second PEgRNA to a second search target sequence on the second strand of the target gene upon said contacting of the second PEgRNA.

[0814] In some embodiments, contacting the target gene with the prime editing composition results in binding of the prime editor to the target gene, e.g., the target DMPK gene, upon the contacting of the PE composition with the target gene. In some embodiments, a DNA binding domain of a prime editor associates with either a first PEgRNA and/or a second PEgRNA. In some embodiments, a prime editor associated with a first PEgRNA binds the first strand of a target gene, e.g., a DMPK gene, as directed by the first PEgRNA. In some embodiments, a prime editor associated with a second PEgRNA binds the second strand of a target gene, e.g., a DMPK gene, as directed by the second PEgRNA. In some embodiments, a prime editor associated with a first PEgRNA binds the first strand of a target gene as directed by the first PEgRNA, and a prime editor associated with a second PEgRNA binds the second strand of the target gene as directed by the second PEgRNA.

[0815] In some embodiments, a first PEgRNA directs a prime editor to generate a nick on the second strand of a target gene. In some embodiments, a second PEgRNA directs a prime editor to generate a nick on the first strand of a target gene. In some embodiments, a first PEgRNA directs a prime editor to generate a first nick on the second strand of a target gene, and a second PEgRNA directs a prime editor to generate a second nick on the first strand of a target gene, thereby generating an inter-nick duplex (IND) between the position of the first nick and the position of the second nick on the target gene. In some embodiments, the DNA binding domain of the prime editor is a Cas domain. In some embodiments, the DNA binding domain of the prime editor is a Cas9. In some embodiments, the DNA binding domain of the prime editor is a Cas9 nickase.

[0816] In some embodiments, contacting the target gene with the prime editing composition results in hybridization of the PEgRNA (e.g., the first PEgRNA and/or the second PEgRNA) with the 3′ end of the nicked single-stranded DNA, thereby priming DNA polymerization by a DNA polymerase domain of the prime editor. In some embodiments, the free 3′ end of the single-stranded DNA generated at the nick site hybridizes to a primer binding site sequence (PBS) of the contacted PEgRNA, thereby priming DNA polymerization. In some embodiments, the DNA polymerization is reverse transcription catalyzed by a reverse transcriptase domain of the prime editor. In some embodiments, the method comprises contacting the target gene with a DNA polymerase, e.g., a reverse transcriptase, as a part of a prime editor fusion protein or prime editing complex (in cis), or as a separate protein (in trans).

[0817] In some embodiments, contacting the target gene with the prime editing composition generates an overlap duplex (OD) or replacement duplex (RD) that replaces the IND. In some embodiments, the OD or RD comprises one or more intended nucleotide edits compared to the endogenous sequence of the target gene, e.g., a DMPK gene. In some embodiments, the intended nucleotide edits are incorporated in the target gene by replacement of the IND by the OD or RD. In some embodiments, the intended nucleotide edits are incorporated in the target gene by excision of the IND and DNA repair. In some embodiments, excision of the 5′ single stranded DNA of the edit strand generated at the nick site is by a flap endonuclease. In some embodiments, the flap nuclease is FEN1. In some embodiments, the method further comprises contacting the target gene with a flap endonuclease. In some embodiments, the flap endonuclease is provided as a part of a prime editor fusion protein. In some embodiments, the flap endonuclease is provided in trans.

[0818] In some embodiments, the target gene, e.g., a DMPK gene, is in a cell. Accordingly, also provided herein are methods of modifying a cell.

[0819] In some embodiments, the prime editing method comprises introducing a first PEgRNA, a second PEgRNA, and a prime editor into the cell that has the target gene. In some embodiments, the prime editing method comprises introducing into the cell that has the target gene with a prime editing composition comprising a first PEgRNA, a second PEgRNA, and a prime editor polypeptide. In some embodiments, the first PEgRNA, the second PEgRNA, and the prime editor polypeptides form complexes prior to the introduction into the cell. In some embodiments, the first PEgRNA, the second PEgRNA, and the prime editor polypeptides form complexes after the introduction into the cell. The prime editors, PEgRNAs and prime editing complexes may be introduced into the cell by any delivery approaches described herein or any delivery approach known in the art, including ribonucleoprotein (RNPs), lipid nanoparticles (LNPs), viral vectors, non-viral vectors, mRNA delivery, and physical techniques such as cell membrane disruption by a microfluidics device. The prime editors, PEgRNAs, and prime editing complexes may be introduced into the cell simultaneously or sequentially.

[0820] In some embodiments, the prime editing method comprises introducing into the cell a first PEgRNA and a second PEgRNA, or polynucleotides encoding the first PEgRNA and the second PEgRNA, and a prime editor polynucleotide encoding a prime editor polypeptide. In some embodiments, the method comprises introducing the first PEgRNA and the second PEgRNA or the polynucleotides encoding the first PEgRNA and the second PEgRNA, and the polynucleotide encoding the prime editor polypeptide into the cell simultaneously. In some embodiments, the method comprises introducing the first PEgRNA and the second PEgRNA or the polynucleotides encoding the first PEgRNA and the second PEgRNA, and the polynucleotide encoding the prime editor polypeptide into the cell sequentially. In some embodiments, the method comprises introducing the polynucleotide encoding the prime editor polypeptide into the cell before introduction of the first PEgRNA and the second PEgRNA or the polynucleotides encoding the first PEgRNA and the second PEgRNA. In some embodiments, the polynucleotide encoding the prime editor polypeptide is introduced into and expressed in the cell before introduction of the first PEgRNA and the second PEgRNA or the polynucleotides encoding the first PEgRNA and the second PEgRNA into the cell. In some embodiments, the polynucleotide encoding the prime editor polypeptide is introduced into the cell after the first PEgRNA and the second PEgRNA or the polynucleotides encoding the first PEgRNA and the second PEgRNA are introduced into the cell. The polynucleotide encoding the prime editor polypeptide, the first PEgRNA and the second PEgRNA or the polynucleotides encoding the first PEgRNA and the second PEgRNA, may be introduced into the cell by any delivery approaches described herein or any delivery approach known in the art, for example, by RNPs, LNPs, viral vectors, non-viral vectors, mRNA delivery, and physical delivery.

[0821] In some embodiments, the polynucleotide encoding the prime editor polypeptide and the polynucleotides encoding the first PEgRNA and the second PEgRNA integrate into the genome of the cell after being introduced into the cell. In some embodiments, the polynucleotide encoding the prime editor polypeptide and the polynucleotides encoding the first PEgRNA and the second PEgRNA are introduced into the cell for transient expression. Accordingly, also provided herein are cells modified by prime editing.

[0822] In some embodiments, the cell is a prokaryotic cell. In some embodiments, the cell is a eukaryotic cell. In some embodiments, the cell is a mammalian cell. In some embodiments, the cell is a non-human primate cell, bovine cell, porcine cell, rodent or mouse cell. In some embodiments, the cell is a human cell. In some embodiments, the cell is a primary cell. In some embodiments, the cell is a human primary cell. In some embodiments, the cell is a progenitor cell. In some embodiments, the cell is a human progenitor cell. In some embodiments, the cell is a muscle cell. In some embodiments, the cell is a primary muscle cell. In some embodiments, the cell is a human muscle cell. In some embodiments, the cell is a primary human muscle cell. In some embodiments, the cell is a primary human muscle cell derived from an induced human pluripotent stem cell (iPSC). In some embodiments, the cell is a neuron. In some embodiments, the cell is a neuron from basal ganglia. In some embodiments, the cell is a neuron from basal ganglia of a subject. In some embodiments, the cell is a fibroblast. In some embodiments, the cell is a human fibroblast. In some embodiments, the cell is a myogenic cell. In some embodiments, the cell is a myoblast. In some embodiments, the cell is a human myogenic cell. In some embodiments, the cell is a human myoblast. In some embodiments, the cell is a cardiac muscle cell. In some embodiments, the cell is a smooth muscle cell. In some embodiments, the cell is a myosatellite cell (also referred to as a satellite cell). In some embodiments, the cell is a human myosatellite cell. In some embodiments, the cell is a differentiated muscle cell. In some embodiments, the cell is a skeletal muscle cell. In some embodiments, the skeletal muscle cell is differentiated from an iPSC, ESC or myosatellite cell.

[0823] In some embodiments, the target gene edited by prime editing is in a chromosome of the cell. In some embodiments, the intended nucleotide edits incorporate in the chromosome of the cell and are inheritable by progeny cells. In some embodiments, the intended nucleotide edits introduced to the cell by the prime editing compositions and methods are such that the cell and progeny of the cell also include the intended nucleotide edits. In some embodiments, the cell is autologous, allogeneic, or xenogeneic to a subject. In some embodiments, the cell is from or derived from a subject. In some embodiments, the cell is from or derived from a human subject. In some embodiments, the cell is introduced back into the subject, e.g., a human subject, after incorporation of the intended nucleotide edits by prime editing.

[0824] In some embodiments, the method provided herein comprises introducing the prime editor polypeptide or the polynucleotide encoding the prime editor polypeptide, and the PEgRNAs (e.g., the first PEgRNA and the second PEgRNA) or the polynucleotides encoding the PEgRNAs, into a plurality or a population of cells that comprise the target gene. In some embodiments, the population of cells is of the same cell type. In some embodiments, the population of cells is of the same tissue or organ. In some embodiments, the population of cells is heterogeneous. In some embodiments, the population of cells is homogeneous. In some embodiments, the population of cells is from a single tissue or organ, and the cells are heterogeneous. In some embodiments, the introduction into the population of cells is ex vivo. In some embodiments, the introduction into the population of cells is in vivo, e.g., into a human subject.

[0825] In some embodiments, the target gene is in a genome of each cell of the population. In some embodiments, introduction of the prime editor polypeptide or the polynucleotide encoding the prime editor polypeptide, and the PEgRNAs (e.g., the first PEgRNA and the second PEgRNA) or the polynucleotides encoding the PEgRNAs, results in incorporation of one or more intended nucleotide edits in the target gene in at least one of the cells in the population of cells. In some embodiments, introduction of the prime editor polypeptide or the polynucleotide encoding the prime editor polypeptide, and the PEgRNAs or the polynucleotides encoding the PEgRNAs, results in incorporation of the one or more intended nucleotide edits in the target gene in a plurality of the population of cells. In some embodiments, introduction of the prime editor polypeptide or the polynucleotide encoding the prime editor polypeptide, and the PEgRNAs or the polynucleotide encoding the PEgRNAs, results in incorporation of the one or more intended nucleotide edits in the target gene in each cell of the population of cells. In some embodiments, introduction of the prime editor polypeptide or the polynucleotide encoding the prime editor polypeptide, and the PEgRNAs or the polynucleotides encoding the PEgRNAs, results in incorporation of the one or more intended nucleotide edits in the target gene in sufficient number of cells such that the disease or disorder is treated, prevented or ameliorated.

[0826] In some embodiments, editing efficiency of the prime editing compositions and method described herein can be measured by calculating the percentage of edited target genes in a population of cells introduced with the prime editing composition. The percentage of edited target genes can be assessed in any method known in the art, for example, with a next generation sequencing platform (e.g. Miseq) and suitable primers, by the percentage of edited reads over total sequenced reads. In some embodiments, the editing efficiency is determined after 1 hour, 2 hours, 6 hours, 12 hours, 24 hours, 36 hours, 48 hours, 3 days, 4 days, 5 days, 7 days, 10 days, or 14 days of exposing a target gene (e.g., a DMPK gene within the genome of a cell) to a prime editing composition. In some embodiments, the population of cells introduced with the prime editing composition is ex vivo. In some embodiments, the population of cells introduced with the prime editing composition is in vitro. In some embodiments, the population of cells introduced with the prime editing composition is in vivo.

[0827] In some embodiments, the dual prime editing compositions and methods disclosed herein have an editing efficiency of at least about 1%, at least about 5%, at least about 10%, at least about 20%, at least about 30%, at least about 40%, at least about 50%, at least about 60%, at least about 70%, at least about 80%, at least about 90%, at least about 95%, or at least about 99%. In some embodiments, the prime editing methods disclosed herein have an editing efficiency of at least 25%. In some embodiments, the prime editing methods disclosed herein have an editing efficiency of at least 30%. In some embodiments, the prime editing methods disclosed herein have an editing efficiency of at least 35%. In some embodiments, the prime editing methods disclosed herein have an editing efficiency of at least 45%. In some embodiments, the prime editing methods disclosed herein have an editing efficiency of at least 50%.

[0828] In some embodiments, the dual prime editing compositions and methods disclosed herein have an editing efficiency of at least about 1%, at least about 5%, at least about 7.5%, at least about 10%, at least about 15%, at least about 20%, at least about 30%, at least about 40%, at least about 50%, at least about 60%, at least about 70%, at least about 80%, at least about 90%, at least about 95%, or at least about 99% of editing a primary cell.

[0829] In some embodiments, the dual prime editing compositions and methods disclosed herein have an editing efficiency of at least about 5%, at least about 7.5%, at least about 10%, at least about 15%, at least about 20%, at least about 30%, at least about 40%, at least about 50%, at least about 60%, at least about 70%, at least about 80%, at least about 90%, at least about 95%, or at least about 99% of editing a muscle cell relative to a corresponding control muscle cell. In some embodiments, the muscle cell is a human muscle cell.

[0830] In some embodiments, the dual prime editing compositions and methods provided herein are capable of incorporating one or more intended nucleotide edits without generating a significant proportion of indels. The term “indel(s)”, as used herein, refers to the insertion or deletion of a nucleotide base within a polynucleotide, for example, a target gene. Such insertions or deletions can lead to frame shift mutations within a coding region of a gene. Indel frequency of editing can be calculated by methods known in the art. In some embodiments, indel frequency can be calculated based on sequence alignment such as the CRISPResso 2 algorithm as described in Clement et al., Nat. Biotechnol. 37(3): 224-226 (2019), which is incorporated herein in its entirety. In some embodiments, the methods disclosed herein can have an indel frequency of less than 20%, less than 10%, less than 9%, less than 8%, less than 7%, less than 6%, less than 5%, less than 4%, less than 3%, less than 2%, less than 1.5%, or less than 1%. In some embodiments, any number of indels is determined after at least 1 hour, at least 2 hours, at least 6 hours, at least 12 hours, at least 24 hours, at least 36 hours, at least 48 hours, at least 3 days, at least 4 days, at least 5 days, at least 7 days, at least 10 days, or at least 14 days of exposing a target gene (e.g., a DMPK gene within the genome of a cell) to a prime editing composition.

[0831] In some embodiments, the prime editing compositions provided herein are capable of incorporating one or more intended nucleotide edits efficiently without generating a significant proportion of indels. In some embodiments, the prime editing methods disclosed herein have an editing efficiency of at least about 1% and an indel frequency of less than about 5%, less than about 2.5%, less than about 1%, less than about 0.5%, or less than about 0.1% in a target cell, e.g., a human primary cell or muscle cell.

[0832] In some embodiments, the prime editing methods disclosed herein have an editing efficiency of at least about 5% and an indel frequency of less about 5%, less than about 2.5%, less than about 1%, less than about 0.5%, or less than about 0.1% in a target cell, e.g., a human primary cell or muscle cell.

[0833] In some embodiments, the prime editing methods disclosed herein have an editing efficiency of at least about 7.5% and an indel frequency of less than about 5%, less than about 2.5%, less than about 1%, less than about 0.5%, or less than about 0.1% in a target cell, e.g., a human primary cell or muscle cell.

[0834] In some embodiments, the prime editing methods disclosed herein have an editing efficiency of at least about 10% and an indel frequency of less than about 5%, less than about 2.5%, less than about 1%, less than about 0.5%, or less than about 0.1% in a target cell, e.g., a human primary cell or muscle cell.

[0835] In some embodiments, the prime editing methods disclosed herein have an editing efficiency of at least about 15% and an indel frequency of less than about 5%, less than about 2.5%, less than about 1%, less than about 0.5%, or less than about 0.1% in a target cell, e.g., a human primary cell or muscle cell.

[0836] In some embodiments, the prime editing methods disclosed herein have an editing efficiency of at least about 20% and an indel frequency of less than about 5%, less than about 2.5%, less than about 1%, less than about 0.5%, or less than about 0.1% in a target cell, e.g., a human primary cell or muscle cell.

[0837] In some embodiments, the prime editing methods disclosed herein have an editing efficiency of at least about 30% and an indel frequency of less than about 5%, less than about 2.5%, less than about 1%, less than about 0.5%, or less than about 0.1% in a target cell, e.g., a human primary cell or muscle cell.

[0838] In some embodiments, the prime editing methods disclosed herein have an editing efficiency of at least about 40% and an indel frequency of less than about 5%, less than about 2.5%, less than about 1%, less than about 0.5%, or less than about 0.1% in a target cell, e.g., a human primary cell or muscle cell.

[0839] In some embodiments, the prime editing methods disclosed herein have an editing efficiency of at least about 50% and an indel frequency of less than about 5%, less than about 2.5%, less than about 1%, less than about 0.5%, or less than about 0.1% in a target cell, e.g., a human primary cell or muscle cell.

[0840] In some embodiments, the prime editing methods disclosed herein have an editing efficiency of at least about 60% and an indel frequency of less than about 5%, less than about 2.5%, less than about 1%, less than about 0.5%, or less than about 0.1% in a target cell, e.g., a human primary cell or muscle cell.

[0841] In some embodiments, the prime editing methods disclosed herein have an editing efficiency of at least about 70% and an indel frequency of less than about 5%, less than about 2.5%, less than about 1%, less than about 0.5%, or less than about 0.1% in a target cell, e.g., a human primary cell or muscle cell.

[0842] In some embodiments, the prime editing methods disclosed herein have an editing efficiency of at least about 80% and an indel frequency of less than about 5%, less than about 2.5%, less than about 1%, less than about 0.5%, or less than about 0.1% in a target cell, e.g., a human primary cell or muscle cell.

[0843] In some embodiments, the prime editing methods disclosed herein have an editing efficiency of at least about 90% and an indel frequency of less than about 5%, less than about 2.5%, less than about 1%, less than about 0.5%, or less than about 0.1% in a target cell, e.g., a human primary cell or muscle cell.

[0844] In some embodiments, the prime editing methods disclosed herein have an editing efficiency of at least about 95% and an indel frequency of less than about 5%, less than about 2.5%, less than about 1%, less than about 0.5%, or less than about 0.1% in a target cell, e.g., a human primary cell or muscle cell.

[0845] In some embodiments, the prime editing composition described herein results in less than 50%, less than 40%, less than 30%, less than 20%, less than 19%, less than 18%, less than 17%, less than 16%, less than 15%, less than 14%, less than 13%, less than 12%, less than 11%, less than 10%, less than 9%, less than 8%, less than 7%, less than 6%, less than 5%, less than 4%, less than 3%, less than 2%, less than 1%, less than 0.9%, less than 0.8%, less than 0.7%, less than 0.6%, less than 0.5%, less than 0.4%, less than 0.3%, less than 0.2%, less than 0.1%, less than 0.09%, less than 0.08%, less than 0.07%, less than 0.06%, less than 0.05%, less than 0.04%, less than 0.03%, less than 0.02%, or less than 0.01% off-target editing in a chromosome that includes the target gene. In some embodiments, off-target editing is determined after at least 1 hour, at least 2 hours, at least 6 hours, at least 12 hours, at least 24 hours, at least 36 hours, at least 48 hours, at least 3 days, at least 4 days, at least 5 days, at least 7 days, at least 10 days, or at least 14 days of exposing a target gene (e.g., a nucleic acid within the genome of a cell) to a prime editing composition.

[0846] In some embodiments, the prime editing compositions (e.g., the PEgRNAs and prime editors as described herein) and dual prime editing methods disclosed herein can be used to edit a target DMPK gene. In some embodiments, the target DMPK gene comprises a mutation compared to a wild type DMPK gene. In some embodiments, the mutation is associated with myotonic dystrophy type 1 (DM1). In some embodiments, the target DMPK gene comprises an IND sequence that contains the mutation associated with myotonic dystrophy type 1 (DM1). In some embodiments, the PEgRNAs of the prime editing compositions direct replacement of an edited portion of a DMPK gene into the DMPK gene. In some embodiments, the mutation is associated with myotonic dystrophy (e.g., DM1). In some embodiments, the mutation is in the 3′ untranslated region of the DMPK gene. In some embodiments, the mutation is expansion of the number of CTG repeats in the 3′ untranslated region of the DMPK gene. In some embodiments, the mutation is an increased number of tri-nucleotide repeats in the array of tri-nucleotide repeats compared to a wild type DMPK gene. In some embodiments, the mutation is an array of tri-nucleotide repeats comprising the sequence (CTG)n or a complementary sequence thereof, wherein n is any integer greater than 34. In some embodiments, n is an integer greater than 50. In some embodiments, n is an integer greater than 100. In some embodiments, n is an integer greater than 200, 300, 400, 500, 600, 700, 800, 900, or 1000. In some embodiments, n is an integer greater than 1000. In some embodiments, the prime editing method comprises contacting a target DMPK gene with a prime editing composition comprising a prime editor, a first PEgRNA and a second PEgRNA. In some embodiments, contacting the target DMPK gene with the prime editing composition results in incorporation of one or more intended nucleotide edits in the target DMPK gene. In some embodiments, the incorporation is in a region of the target DMPK gene that corresponds to an IND in the DMPK gene. In some embodiments, the one or more intended nucleotide edits comprises a nucleotide substitution, an insertion, a deletion, or any combination thereof, compared to the endogenous sequence of the target DMPK gene. In some embodiments, incorporation of the one or more intended nucleotide edits results in replacement of the one or more mutations with the corresponding sequence in a wild type DMPK gene. In some embodiments, incorporation of the one more intended nucleotide edits results in correction of a mutation in the target DMPK gene. In some embodiments, the target DMPK gene comprises an IND sequence that contains the mutation. In some embodiments, contacting the target DMPK gene with the prime editing composition results in incorporation of one or more intended nucleotide edits in the target DMPK gene, which corrects the mutation in the IND in the target DMPK gene.

[0847] In some embodiments, a population of patients with mutations in the target DMPK gene may be treated with a prime editing composition (e.g., the pair of PEgRNAs and a prime editor as described herein) disclosed herein. In some embodiments, a population of patients with different distinct mutations in the target DMPK gene can be treated with a single prime editing composition comprising the same pair of PEgRNAs and a prime editor. In some embodiments, a single prime editing composition comprising the same pair of PEgRNAs and a prime editor can be used to correct one or more mutations in the target DMPK gene in a populations of patients, wherein one or more patients in the population have different mutations from one another. In some embodiments, the prime editing composition comprising the same pair of PEgRNAs and a prime editor can be used to correct two or more mutations in the target DMPK gene in a populations of patients, wherein one or more patients in the population have different mutations from one another. In some embodiments, the prime editing composition comprising the same pair of PEgRNAs and a prime editor can be used to correct 2, 3, 4, 5, 6, 7, 8, 9, 10, 15, 20, 25 or more mutations in the target DMPK gene in a populations of patients, wherein one or more patients in the population have different mutations from one another. In some embodiments, the prime editing composition comprising the same pair of PEgRNAs and a prime editor can be used to correct 30, 35, 40, 45, 50, 60 more mutations in the target DMPK gene in a populations of patients, wherein one or more patients in the population have different mutations from one another. In some embodiments, the first PEgRNA in the pair of PEgRNAs comprises a first editing template comprising a wild type sequence of the DMPK gene. In some embodiments, the second PEgRNA in the pair of PEgRNAs comprises a second editing template comprising a wild type sequence of the DMPK gene.

[0848] In some embodiments, a patient with multiple mutations in the target DMPK gene may be treated with a prime editing composition (e.g., the pair of PEgRNAs and a prime editor as described herein) disclosed herein. For example, in some embodiments, a subject may comprise two copies of the DMPK gene, each comprising one or more different mutations. In some embodiments, a patient with one or more different mutations in the target DMPK gene can be treated with a single prime editing composition comprising a pair of PEgRNAs and a prime editor.

[0849] In some embodiments, the dual prime editing composition can be used to correct all of the mutations in a portion of the DMPK gene. In some embodiments, the dual prime editing composition can be used to correct all of the mutations in the entire DMPK gene.

[0850] In some embodiments, incorporation of the one or more intended nucleotide edits results in correction of a mutation in the 3′ untranslated region of the DMPK gene. In some embodiments, the mutation is associated with myotonic dystrophy (e.g., DM1). In some embodiments, the mutation is expansion of the number of CTG repeats in the 3′ untranslated region of the DMPK gene. In some embodiments, the mutation is an increased number of tri-nucleotide repeats in the array of tri-nucleotide repeats compared to a wild type DMPK gene. In some embodiments, the mutation is an array of tri-nucleotide repeats comprising the sequence (CTG)n or a complementary sequence thereof, wherein n is any integer greater than 34. In some embodiments, n is an integer greater than 50. In some embodiments, n is an integer greater than 100. In some embodiments, n is an integer greater than 200, 300, 400, 500, 600, 700, 800, 900, or 1000. In some embodiments, n is an integer greater than 1000. In some embodiments, incorporation of the one or more intended nucleotide edits results in deletion of the CTG repeats in the 3′ untranslated region of the DMPK gene entirely. In some embodiments, incorporation of the one or more intended nucleotide edits results in reduced number of CTG repeats in the 3′ untranslated region of the DMPK gene. In some embodiments, incorporation of the one or more intended nucleotide edits results in the number of CTG repeats in the 3′ untranslated region of the DMPK gene to be less than 35. In some embodiments, incorporation of the one or more intended nucleotide edits results in the number of CTG repeats in the 3′ untranslated region of the DMPK gene to be less than 34. In some embodiments, incorporation of the one or more intended nucleotide edits results in the number of CTG repeats in the 3′ untranslated region of the DMPK gene to be less than 30, 20, or 10. In some embodiments, incorporation of the one or more intended nucleotide edits results in the number of CTG repeats in the 3′ untranslated region of the DMPK gene to be 5. In some embodiments, incorporation of the one or more intended nucleotide edits results in correction of a DMPK gene sequence and restores expression of wild type DMPK transcripts.

[0851] In some embodiments, the target DMPK gene is in a target cell. Accordingly, in one aspect provided herein is a method of editing a target cell comprising a target DMPK gene that encodes a polypeptide that comprises one or more mutations relative to a wild type DMPK gene. In some embodiments, the methods of the present disclosure comprise introducing a prime editing composition comprising a pair of PEgRNAs (i.e., first PEgRNA and a second PEgRNA), and a prime editor polypeptide into the target cell that has the target DMPK gene to edit the target DMPK gene, thereby generating an edited cell. In some embodiments, the target cell is a mammalian cell. In some embodiments, the target cell is a human cell. In some embodiments, the target cell is a primary cell. In some embodiments, the target cell is a human primary cell. In some embodiments, the target cell is a progenitor cell. In some embodiments, the target cell is a human progenitor cell. In some embodiments, the target cell is a stem cell. In some embodiments, the target cell is a human stem cell. In some embodiments, the target cell is a muscle cell. In some embodiments, the target cell is a human muscle cell. In some embodiments, the target cell is a primary human muscle cell derived from an induced human pluripotent stem cell (iPSC). In some embodiments, the cell is a neuron. In some embodiments, the cell is a neuron from basal ganglia. In some embodiments, the cell is a neuron from basal ganglia of a subject. In some embodiments, the cell is a neuron in the basal ganglia of a subject.

[0852] In some embodiments, components of a prime editing composition described herein are provided to a target cell in vitro. In some embodiments, components of a prime editing composition described herein are provided to a target cell ex vivo. In some embodiments, components of a prime editing composition described herein are provided to a target cell in vivo.

[0853] In some embodiments, incorporation of the one or more intended nucleotide edits in the target DMPK gene that comprises one or more mutations restores wild type expression and function of the DMPK protein encoded by the DMPK gene. In some embodiments, the target DMPK gene comprises an expansion of the number of CTG repeats as compared to the wild type DMPK gene prior to incorporation of the one or more intended nucleotide edits. In some embodiments, expression of a DMPK transcript with reduced number of CTG repeats compared to a DMPK transcript encoded by the endogenous DMPK gene may be measured when expressed in a target cell. In some embodiments, a change in the level of DMPK mRNA expression comprises a decrease in the amount of DMPK transcripts having 35 or more CTG repeats. In some embodiments, a change in the level of DMPK mRNA expression can comprise a fold change of, e.g., at least about 2-fold decrease, about 3-fold decrease, about 4-fold decrease, about 5-fold decrease, about 6-fold decrease, about 7-fold decrease, about 8-fold decrease, about 9-fold decrease, about 10-fold decrease, about 25-fold decrease, about 50-fold decrease, about 100-fold decrease, about 200-fold decrease, about 500-fold decrease, about 700-fold decrease, about 1000-fold decrease, about 5000-fold decrease, or about 10,000-fold decrease in the amount of DMPK transcripts having 35 or more CTG repeats.

[0854] In some embodiments, increase in expression and/or function of proteins affected by expansion of CTG repeats in the DMPK gene can be measured by a functional assay. For example, in some embodiments, function of proteins of the Muscleblind-like (MBNL) family can be measured to examine the editing efficiency of the DMPK gene.

### Methods of Treating Myotonic Dystrophy

[0855] In some embodiments, provided herein are methods for treatment of a subject diagnosed with a disease associated with or caused by one or more pathogenic mutations that can be corrected by prime editing. In some embodiments, provided herein are methods for treating myotonic dystrophy (e.g., DM1) that comprise administering to a subject a therapeutically effective amount of a prime editing composition, or a pharmaceutical composition comprising a prime editing composition as described herein.

[0856] Myotonic dystrophy is a genetic disorder that impairs muscle function. One of the main types of myotonic dystrophy is myotonic dystrophy type 1 (also referred to herein as “DM1” or “DM”). DM1 is an autosomal dominant neuromuscular disorder. Affected individuals display a wide range of symptoms including myotonia, skeletal muscle weakness and wasting, cardiac conduction abnormalities, and cataracts. DM1 is associated with mutations in the DMPK gene as set forth in the DM1 protein kinase by human genome assembly consortium Human Build 38 patch release 13 (GRCh38.p13), NCBI GenBank or RefSeq assembly accessions (GCA_000001405.28; GCF_000001405.39). The DMPK gene is located on the long arm of human chromosome 19. The DMPK gene encodes the myotonic dystrophy protein kinase (DMPK protein), which is believed to play a role in communication and impulse transmission within and between cells.

[0857] The 3′ untranslated region of the DMPK gene contains multiple copies of a cytosine-thymine-guanine (CTG) trinucleotide repeat. In most people, the number of CTG repeats in the DMPK gene ranges from about 5 to 34. DM1 is characterized by expansion of the CTG repeat numbers in the DMPK gene above a normal range. Repeat expansion is associated with disruption of local chromatin structure that may lead to dysfunction of a number of genes in the vicinity of the repeat expansion region. Repeat expansion results in increased number of repeats in the DMPK transcript, which can form stable double-stranded structures that have strong affinity for other functional proteins, e.g., proteins of the Muscleblind-like (MBNL) family, and prohibit the proteins from performing their normal functions. This causes problems for cells by trapping and disabling important proteins, consequently preventing cells in muscles and other tissues from functioning normally. The expanded repeats can also result in abnormal splicing patterns in adult tissues, which can affect expression of hundreds of genes.

[0858] The severity of myotonic dystrophy is correlated with the number of abnormally expanded CTG repeats in the DMPK gene. People with symptoms of myotonic dystrophy type 1, including muscle weakness and wasting beginning in adulthood, usually have above 100 to 1000 CTG repeats. People born with more severe, congenital form of myotonic dystrophy type 1 tend to have more than 1,000 CTG repeats in their cells. People with mild form of myotonic dystrophy type 1 symptoms usually have between 50 and 150 CTG repeats in their cells. While smaller number of CTG repeats may only relate to mild symptoms or may be asymptomatic, as the altered DMPK gene is passed from one generation to the next, the size of the CTG repeat expansion may increases in size. For example, people with 35 to 49 CTG repeats do not develop myotonic dystrophy type 1, but their children may be at risk of having the disorder if the number of CTG repeats increases.

[0859] In some embodiments, administration of the prime editing composition results in incorporation of one or more intended nucleotide edits in the target gene in the subject. In some embodiments, administration of the prime editing composition results in correction of one or more pathogenic mutations, e.g., point mutations, insertions, or deletions, associated with myotonic dystrophy (DM1) in the subject. In some embodiments, the target gene comprises a sequence, e.g., the IND sequence, that contains the pathogenic mutation. In some embodiments, administration of the prime editing composition results in incorporation of one or more intended nucleotide edits in the target gene that corrects the pathogenic mutation, or reduces the pathogenic effect of the mutation, by deleting the sequence of the IND and optionally replacing the IND sequence with one or more endogenous or exogenous sequence that has a reduced number of CTG repeats or does not comprise a CTG repeat in the target gene, thereby treating DM1 in the subject.

[0860] In some embodiments, the method provided herein comprises administering to a subject an effective amount of a prime editing composition, for example, a pair of PEgRNAs (i.e., a first PEgRNA and a second PEgRNA) and a prime editor. In some embodiments, the method comprises administering to the subject an effective amount of a prime editing composition described herein, for example, polynucleotides, vectors, or constructs that encode prime editing composition components, or RNPs, LNPs, and/or polypeptides comprising prime editing composition components. Prime editing compositions can be administered to target the DMPK gene in a subject, e.g., a human subject, suffering from, having, susceptibility to, or at risk for myotonic dystrophy (e.g., DM1). Identifying a subject in need of such treatment can be in the judgment of a subject or a health care professional and can be subjective (e.g., opinion) or objective (e.g., measurable by a test or diagnostic method). In some embodiments, the subject has myotonic dystrophy (e.g., DM1).

[0861] In some embodiments, the subject has been diagnosed with myotonic dystrophy by sequencing of a DMPK gene in the subject. In some embodiments, the subject comprises at least a copy of the DMPK gene that comprises one or more mutations compared to a wild type DMPK gene. In some embodiments, the subject comprises at least a copy of the DMPK gene that comprises a mutation in a non-coding region of the DMPK gene. In some embodiments, the subject comprises at least a copy of the DMPK gene that comprises a mutation in the 3′ untranslated region of the DMPK gene, as compared to a wild type DMPK gene. In some embodiments, the subject comprises two copies of the DMPK gene, wherein each of the two copies comprises a mutation in the 3′ untranslated region of the DMPK gene as compared to a wild type DMPK gene. In some embodiments, the mutation is increased number of CTG repeats in the 3′ untranslated region as compared to a wild type DMPK gene.

[0862] In some embodiments, the method comprises directly administering prime editing compositions provided herein to a subject. The prime editing compositions described herein can be delivered with in any form as described herein, e.g., as LNPs, RNPs, polynucleotide vectors such as viral vectors, or mRNAs. The prime editing compositions can be formulated with any pharmaceutically acceptable carrier described herein or known in the art for administering directly to a subject. Components of a prime editing composition or a pharmaceutical composition thereof may be administered to the subject simultaneously or sequentially. For example, in some embodiments, the method comprises administering a prime editing composition, or pharmaceutical composition thereof, comprising prime editor complexes that comprises (i) a prime editor fusion protein and a first PEgRNA and (ii) a prime editor fusion protein and a second PEgRNA to a subject. In some embodiments, the method comprises administering a polynucleotide or vector encoding a prime editor to a subject simultaneously with the two PEgRNAs. In some embodiments, the method comprises administering a polynucleotide or vector encoding a prime editor to a subject before administration of the two PEgRNAs. In some embodiments, the two PEgRNAs are administered simultaneously. In some embodiments, the two PEgRNAs are administered sequentially. In some embodiments, a first PEgRNA is administered with a prime editor and a second PEgRNA is administered after administration of the first PEgRNA and prime editor. In some embodiments, a first PEgRNA is administered with a prime editor and a second PEgRNA is administered before administration of the first PEgRNA and prime editor.

[0863] Suitable routes of administrating the prime editing compositions to a subject include, without limitation: topical, subcutaneous, transdermal, intradermal, intralesional, intraarticular, intraperitoneal, intravesical, transmucosal, gingival, intradental, intracochlear, transtympanic, intraorgan, epidural, intrathecal, intramuscular, intravenous, intravascular, intraosseus, periocular, intratumoral, intracerebral, and intracerebroventricular administration. In some embodiments, the compositions described are administered intraperitoneally, intravenously, or by direct injection or direct infusion. In some embodiments, the compositions described are administered by direct injection into the muscle of a subject. In some embodiments, the compositions described herein are administered to a subject by injection, by means of a catheter, by means of a suppository, or by means of an implant.

[0864] In some embodiments, the method comprises administering cells edited with a prime editing composition described herein to a subject. In some embodiments, the cells are allogeneic. In some embodiments, allogeneic cells are or have been contacted ex vivo with a prime editing composition or pharmaceutical composition thereof and are introduced into a human subject in need thereof. In some embodiments, the cells are autologous to the subject. In some embodiments, cells are removed from a subject and contacted ex vivo with a prime editing composition or pharmaceutical composition thereof and are re-introduced into the subject.

[0865] In some embodiments, cells are contacted ex vivo with one or more components of a prime editing composition. In some embodiments, the ex vivo-contacted cells are introduced into the subject, and the subject is administered in vivo with one or more components of a prime editing composition. For example, in some embodiments, cells are contacted ex vivo with a prime editor and introduced into a subject. In some embodiments, the subject is then administered with the PEgRNAs, or polynucleotides encoding the PEgRNAs.

[0866] In some embodiments, cells contacted with the prime editing composition are determined for incorporation of the one or more intended nucleotide edits in the genome before re-introduction into the subject. In some embodiments, the cells are enriched for incorporation of the one or more intended nucleotide edits in the genome before re-introduction into the subject. In some embodiments, the edited cells are primary cells. In some embodiments, the edited cells are progenitor cells. In some embodiments, the edited cells are stem cells. In some embodiments, the edited cells are muscle cells. In some embodiments, the edited cells are primary human cells. In some embodiments, the edited cells are human progenitor cells. In some embodiments, the edited cells are human stem cells. In some embodiments, the edited cells are human muscle cells. In some embodiments, the edited cells are human cardiac muscle cells, human smooth muscle cells, or human myosatellite cells). In some embodiments, the cell is a fibroblast. In some embodiments, the cell is a human fibroblast. In some embodiments, the edited cell is a myogenic cell. In some embodiments, the edited cell is a myoblast. In some embodiments, the edited cell is a human myogenic cell. In some embodiments, the edited cell is a human myoblast. In some embodiments, the cell is a neuron. In some embodiments, the cell is a neuron from basal ganglia. In some embodiments, the cell is a neuron from basal ganglia of a subject. In some embodiments, the cell is a neuron in the basal ganglia of a subject. The prime editing composition or components thereof may be introduced into a cell by any delivery approaches as described herein, including LNP administration, RNP administration, electroporation, nucleofection, transfection, viral transduction, microinjection, cell membrane disruption and diffusion, or any other approach known in the art.

[0867] The cells edited with prime editing can be introduced into the subject by any route known in the art. In some embodiments, the edited cells are administered to a subject by direct infusion. In some embodiments, the edited cells are administered to a subject by intravenous infusion. In some embodiments, the edited cells are administered to a subject as implants.

[0868] The pharmaceutical compositions, prime editing compositions, and cells, as described herein, can be administered in effective amounts. In some embodiments, the effective amount depends upon the mode of administration. In some embodiments, the effective amount depends upon the stage of the condition, the age and physical condition of the subject, the nature of concurrent therapy, if any, and like factors well-known to the medical practitioner.

[0869] The specific dose administered can be a uniform dose for each subject. Alternatively, a subject's dose can be tailored to the approximate body weight of the subject. Other factors in determining the appropriate dosage can include the disease or condition to be treated or prevented, the severity of the disease, the route of administration, and the age, sex and medical condition of the patient.

[0870] In embodiments wherein components of a prime editing composition are administered sequentially, the time between sequential administration can be at least 1 hour, at least 2 hours, at least 6 hours, at least 12 hours, at least 24 hours, at least 36 hours, at least 48 hours, at least 3 days, at least 4 days, at least 5 days, at least 7 days, at least 10 days, or at least 14 days.

[0871] In some embodiments, a method of monitoring treatment progress is provided. In some embodiments, the method includes the step of determining a level of diagnostic marker, for example, correction of a mutation in the DMPK gene, or diagnostic measurement associated with myotonic dystrophy (e.g., DM1), in a subject suffering from myotonic dystrophy symptoms and has been administered an effective amount of a prime editing composition described herein. The level of the diagnostic marker determined in the method can be compared to known levels of the marker in either healthy normal controls or in other afflicted subjects to establish the subject's disease status.

[0872] Various aspects of this disclosure provide kits comprising a prime editing composition. In one embodiment, a kit comprises a prime editing composition comprising a pair of PEgRNAs (i.e. a first PEgRNA and a second PEgRNA) and a prime editor. In one embodiment, a kit comprises a prime editing composition comprising a pair of PEgRNAs (i.e. a first PEgRNA and a second PEgRNA) and a prime editor fusion protein. In some embodiments, the kit comprises a pair of PEgRNAs (i.e. a first PEgRNA and a second PEgRNA) and a polynucleotide encoding a prime editor. In some embodiments, the kit comprises a pair of PEgRNAs (i.e. a first PEgRNA and a second PEgRNA) and a polynucleotide encoding a prime editor fusion protein. In some embodiments, the kit further provides components for delivery of the PEgRNAs and/or the prime editor. In some embodiments, the kit further provides components for delivery of the PEgRNAs and/or the prime editor fusion protein. In some embodiments, the kit further provides components for delivery of the PEgRNAs and/or the polynucleotide encoding the prime editor. In some embodiments, the kit further provides components for delivery of the PEgRNAs and/or the polynucleotide encoding the prime editor fusion protein.

[0873] In some embodiments, the kit provides instructions for using the components of the kit for prime editing. The instructions will generally include information about the use of the kit for editing nucleic acid molecules. In other embodiments, the instructions include at least one of the following: precautions; warnings; clinical studies; and/or references. The instructions may be printed directly on the container (when present), or as a label applied to the container, or as a separate sheet, pamphlet, card, or folder supplied in or with the container. In a further embodiment, a kit can comprise instructions in the form of a label or separate insert (package insert) for suitable operational parameters. In yet another embodiment, the kit can comprise one or more containers with appropriate positive and negative controls or control samples, to be used as standard(s) for detection, calibration, or normalization. The kit can further comprise a second container comprising a pharmaceutically-acceptable buffer, such as (sterile) phosphate-buffered saline, Ringer's solution, or dextrose solution. It can further include other materials desirable from a commercial and user standpoint, including other buffers, diluents, filters, needles, syringes, and package inserts with instructions for use.

### Delivery

[0874] Prime editing compositions described herein can be delivered to a cellular environment with any approach known in the art. Components of a prime editing composition can be delivered to a cell by the same mode or different modes. For example, in some embodiments, a prime editor can be delivered as a polypeptide or a polynucleotide (DNA or RNA) encoding the polypeptide. In some embodiments, a PEgRNA can be delivered directly as an RNA or as a DNA encoding the PEgRNA.

[0875] In some embodiments, a prime editing composition component is encoded by a polynucleotide, a vector, or a construct. In some embodiments, a prime editor polypeptide and PEgRNAs is encoded by a polynucleotide. In some embodiments, the polynucleotide encodes a prime editor fusion protein comprising a DNA binding domain and a DNA polymerase domain. In some embodiments, the polynucleotide encodes a DNA polymerase domain of a prime editor. In some embodiments, the polynucleotide encodes a DNA binding domain of a prime editor. In some embodiments, the polynucleotide encodes a portion of a prime editor protein, for example, a N-terminal portion of a prime editor fusion protein connected to an intein-N. In some embodiments, the polynucleotide encodes a portion of a prime editor protein, for example, a C-terminal portion of a prime editor fusion protein connected to an intein-C. In some embodiments, the polynucleotide encodes a PEgRNA. In some embodiments, the polypeptide encodes two or more components of a prime editing composition, for example, a prime editor fusion protein and a PEgRNA.

[0876] In some embodiments, the polynucleotide encoding one or more prime editing composition components that is delivered to a target cell is integrated into the genome of the cell for long-term expression, for example, by a retroviral vector. In some embodiments, the polynucleotide delivered to a target cell is expressed transiently. For example, the polynucleotide may be delivered in the form of a mRNA, or a non-integrating vector (non-integrating virus, plasmids, minicircle DNAs) for episomal expression.

[0877] In some embodiments, a polynucleotide encoding one or more prime editing system components can be operably linked to a regulatory element, e.g., a transcriptional control element, such as a promoter. In some embodiments, the polynucleotide is operably linked to multiple control elements. Depending on the expression system utilized, any of a number of suitable transcription and translation control elements, including constitutive and inducible promoters, transcription enhancer elements, transcription terminators, etc. may be used in the expression vector (e.g., U6 promoter, Hi promoter).

[0878] In some embodiments, the polynucleotide encoding one or more prime editing composition components is a part of, or is encoded by, a vector. In some embodiments, the vector is a viral vector. In some embodiments, the vector is a non-viral vector.

[0879] Non-viral vector delivery systems can include DNA plasmids, RNA (e.g., a transcript of a vector described herein), naked nucleic acid, and nucleic acid complexed with a delivery vehicle, such as a liposome. In some embodiments, the polynucleotide is provided as an RNA, e.g., a mRNA or a transcript. Any RNA of the prime editing systems, for example a guide RNA or a base editor-encoding mRNA, can be delivered in the form of RNA. In some embodiments, one or more components of the prime editing system that are RNAs is produced by direct chemical synthesis or may be transcribed in vitro from a DNA. In some embodiments, a mRNA that encodes a prime editor polypeptide is generated using in vitro transcription. Guide polynucleotides (e.g., PEgRNA) can also be transcribed using in vitro transcription from a cassette containing a T7 promoter, followed by the sequence “GG”, and guide polynucleotide sequence. In some embodiments, the prime editor encoding mRNA and/or PEgRNA(s) are synthesized in vitro using an RNA polymerase enzyme (e.g., T7 polymerase, T3 polymerase, SP6 polymerase, etc.). Once synthesized, the RNA can directly contact a target DMPK gene or can be introduced into a cell using any suitable technique for introducing nucleic acids into cells (e.g., microinjection, electroporation, transfection). In some embodiments, the prime editor-coding sequences and/or the PEgRNAs are modified to include one or more modified nucleoside e.g., using pseudo-U or 5-Methyl-C.

[0880] Methods of non-viral delivery of nucleic acids can include lipofection, nucleofection, microinjection, biolistics, virosomes, liposomes, immunoliposomes, polycation or lipid:nucleic acid conjugates, naked DNA, artificial virions, cell membrane disruption by a microfluidics device, and agent-enhanced uptake of DNA. Cationic and neutral lipids that are suitable for efficient receptor-recognition lipofection of polynucleotides can be used. Delivery can be to cells (e.g., in vitro or ex vivo administration) or target tissues (e.g., in vivo administration). The preparation of lipid:nucleic acid complexes, including targeted liposomes such as immunolipid complexes, can be used.

[0881] Viral vector delivery systems can include DNA and RNA viruses, which can have either episomal or integrated genomes after delivery to the cell. RNA or DNA viral based systems can be used to target specific cells and trafficking the viral payload to an organelle of the cell. Viral vectors can be administered directly (in vivo) or they can be used to treat cells in vitro, and the modified cells can optionally be administered (ex vivo).

[0882] In some embodiments, the viral vector is a retroviral, lentiviral, adenoviral, adeno-associated viral or herpes simplex viral vector. Retroviral vectors can include those based upon murine leukemia virus (MuLV), gibbon ape leukemia virus (GaLV), simian immunodeficiency virus (SIV), human immunodeficiency virus (HIV), and combinations thereof. In some embodiments, the retroviral vector is a lentiviral vector. In some embodiments, the retroviral vector is a gamma retroviral vector. In some embodiments, the viral vector is an adenoviral vector. In some embodiments, the viral vector is an adeno-associated virus (“AAV”) vector.

[0883] In some embodiments, polynucleotides encoding one or more prime editing composition components are packaged in a virus particle. Packaging cells can be used to form virus particles that can infect a target cell. Such cells can include 293 cells, (e.g., for packaging adenovirus), and .psi.2 (ψ²) cells or PA317 cells (e.g., for packaging retrovirus). Viral vectors can be generated by producing a cell line that packages a nucleic acid vector into a viral particle. The vectors can contain the minimal viral sequences required for packaging and subsequent integration into a host. The vectors can contain other viral sequences being replaced by an expression cassette for the polynucleotide(s) to be expressed. The missing viral functions can be supplied in trans by the packaging cell line. For example, AAV vectors can comprise ITR sequences from the AAV genome which are required for packaging and integration into the host genome.

[0884] In some embodiments, dual AAV vectors are generated by splitting a large transgene expression cassette in two separate halves (5′ and 3′ ends that encode N-terminal portion and C-terminal portion of, e.g., a prime editor polypeptide), where each half of the cassette is no more than 5 kb in length, optionally no more than 4.7 kb in length, and is packaged in a single AAV vector. In some embodiments, the full-length transgene expression cassette is reassembled upon co-infection of the same cell by both dual AAV vectors. In some embodiments, a portion or fragment of a prime editor polypeptide, e.g., a Cas9 nickase, is fused to an intein. The portion or fragment of the polypeptide can be fused to the N-terminus or the C-terminus of the intein. In some embodiments, a N-terminal portion of the polypeptide is fused to an intein-N, and a C-terminal portion of the polypeptide is separately fused to an intein-C. In some embodiments, a portion or fragment of a prime editor fusion protein is fused to an intein and fused to an AAV capsid protein. The intein, nuclease and capsid protein can be fused together in any arrangement (e.g., nuclease-intein-capsid, intein-nuclease-capsid, capsid-intein-nuclease, etc.). In some embodiments, a polynucleotide encoding a prime editor fusion protein is split in two separate halves, each encoding a portion of the prime editor fusion protein and separately fused to an intein. In some embodiments, each of the two halves of the polynucleotide is packaged in an individual AAV vector of a dual AAV vector system. In some embodiments, each of the two halves of the polynucleotide is no more than 5 kb in length, optionally no more than 4.7 kb in length. In some embodiments, the full-length prime editor fusion protein is reassembled upon co-infection of the same cell by both dual AAV vectors, expression of both halves of the prime editor fusion protein, and self-excision of the inteins.

[0885] A target cell can be transiently or non-transiently transfected with one or more vectors described herein. A cell can be transfected as it naturally occurs in a subject. A cell can be taken or derived from a subject and transfected. A cell can be derived from cells taken from a subject, such as a cell line. In some embodiments, a cell transfected with one or more vectors described herein can be used to establish a new cell line comprising one or more vector-derived sequences. In some embodiments, a cell transiently transfected with the compositions of the disclosure (such as by transient transfection of one or more vectors, or transfection with RNA), and modified through the activity of a prime editor, can be used to establish a new cell line comprising cells containing the modification but lacking any other exogenous sequence. Any suitable vector compatible with the host cell can be used with the methods of the disclosure. Non-limiting examples of vectors include pXT1, pSG5, pSVK3, pBPV, pMSG, and pSVLSV40.

[0886] In some embodiments, a prime editor protein can be provided to cells as a polypeptide. In some embodiments, the prime editor protein is fused to a polypeptide domain that increases solubility of the protein. In some embodiments, the prime editor protein is formulated to improve solubility of the protein.

[0887] In some embodiment, a prime editor polypeptide is fused to a polypeptide permeant domain to promote uptake by the cell. In some embodiments, the permeant domain is a peptide, a peptidomimetic, or a non-peptide carrier. For example, a permeant peptide may be derived from the third alpha helix of Drosophila melanogaster transcription factor Antennapaedia, referred to as penetratin, which comprises the amino acid sequence RQIKIWFQNRRMKWKK (SEQ ID NO: 3778). As another example, the permeant peptide can comprise the HIV-1 tat basic region amino acid sequence, which may include, for example, amino acids 49-57 of naturally-occurring tat protein. Other permeant domains can include poly-arginine motifs, for example, the region of amino acids 34-56 of HIV-1 rev protein, nona-arginine, and octa-arginine. The nona-arginine (R9) sequence can be used. The site at which the fusion can be made may be selected in order to optimize the biological activity, secretion or binding characteristics of the polypeptide.

[0888] In some embodiments, a prime editor polypeptide is produced in vitro or by host cells, and it may be further processed by unfolding, e.g., heat denaturation, DTT reduction, etc. and may be further refolded. In some embodiments, a prime editor polypeptide is prepared by in vitro synthesis. Various commercial synthetic apparatuses can be used. By using synthesizers, naturally occurring amino acids can be substituted with unnatural amino acids. In some embodiments, a prime editor polypeptide is isolated and purified in accordance with recombinant synthesis methods, for example, by expression in a host cell and the lysate purified using HPLC, exclusion chromatography, gel electrophoresis, affinity chromatography, or other purification technique.

[0889] In some embodiments, a prime editing composition, for example, prime editor polypeptide components and PEgRNA(s) are introduced to a target cell by nanoparticles. In some embodiments, the prime editor polypeptide components and the PEgRNA form a complex in the nanoparticle. Any suitable nanoparticle design can be used to deliver genome editing system components or nucleic acids encoding such components. In some embodiments, the nanoparticle is inorganic. In some embodiments, the nanoparticle is organic. In some embodiments, a prime editing composition is delivered to a target cell, e.g., a muscle cell, in an organic nanoparticle, e.g., a lipid nanoparticle (LNP) or polymer nanoparticle.

[0890] In some embodiments, LNPs are formulated from cationic, anionic, neutral lipids, or combinations thereof. In some embodiments, neutral lipids, such as the fusogenic phospholipid DOPE or the membrane component cholesterol, are included to enhance transfection activity and nanoparticle stability. In some embodiments, LNPs are formulated with hydrophobic lipids, hydrophilic lipids, or combinations thereof. Lipids may be formulated in a wide range of molar ratios to produce an LNP. Any lipid or combination of lipids that are known in the art can be used to produce an LNP. Exemplary lipids used to produce LNPs are provided in Table 48 below.

[0891] In some embodiments, components of a prime editing composition form a complex prior to delivery to a target cell. For example, a prime editor fusion protein and a PEgRNA can form a complex prior to delivery to the target cell. In some embodiments, a prime editing polypeptide (e.g., a prime editor fusion protein) and a guide polynucleotide (e.g., a PEgRNA) form a ribonucleoprotein (RNP) for delivery to a target cell. In some embodiments, the RNP comprises a prime editor fusion protein in complex with a PEgRNA. RNPs may be delivered to cells using known methods, such as electroporation, nucleofection, or cationic lipid-mediated methods, or any other approaches known in the art. In some embodiments, delivery of a prime editing composition or complex to the target cell does not require the delivery of foreign DNA into the cell. In some embodiments, the RNP comprising the prime editing complex is degraded over time in the target cell. Exemplary lipids for use in nanoparticle formulations and/or gene transfer are shown in Table 48 below.

TABLE 48
Exemplary lipids for nanoparticle formulation or gene transfer

| Lipid | Abbreviation | Feature |
|---|---|---|
| 1,2-Dioleoyl-sn-glycero-3-phosphatidylcholine | DOPC | Helper |
| 1,2-Dioleoyl-sn-glycero-3- | DOPE | Helper |
| phosphatidylethanolamine | | |
| Cholesterol | | Helper |
| N41-(2,3-Dioleyloxy)prophyliN,N,N- | DOTMA | Cationic |
| trimethylammonium chloride | | |
| 1,2-Dioleoyloxy-3-trimethylammonium-propane | DOGS | Cationic |
| Dioctadecylamidoglycylspermine | | |
| N-(3-Aminopropyl)-N,N-dimethyl-2,3- | GAP-DLRIE | Cationic |
| bis(dodecyloxy)-1-propanaminium bromide | | |
| Cetyltrimethylammonium bromide | CTAB | Cationic |
| 6-Lauroxyhexyl omithinate | LHON | Cationic |
| 1-(2,3-Dioleoyloxypropyl)-2,4,6- | 2Oc | Cationic |
| trimethylpyridinium | | |
| 2,3-Dioleyloxy-N-P(spenninecarboxamido- | DOSPA | Cationic |
| ethylJ-N,Ndimethyl-1- | | |
| propanatninium trifluoroacetate | | |
| 1,2-Dioleyl-3-trimethylamtnonium-propane | DOPA | Cationic |
| N-(2-Hydroxyethyl)-N,N-dimethyl-2,3- | MDRIE | Cationic |
| bis(tetradecyloxy)-1-propanaminium bromide | | |
| Dimyristooxypropyl dimethyl hydroxyethyl | DMRI | Cationic |
| ammonium bromide | | |
| 3β-[N-(N′,N′-Dimethylaminoethane)- | DC-Chol | Cationic |
| carbamoyl]cholesterol | | |
| Bis-guanidium-tren-cholesterol | BGTC | Cationic |
| 1,3-Diodeoxy-2-(6-carboxy-spermyl)- | DOSPER | Cationic |
| propylamide | | |
| Dimethyloctadecylammonium bromide | DDAB | Cationic |
| Dioctadecylamidoglicylspermidin | DSL | Cationic |
| rac-[(2,3-Dioctadecyloxypropyl)(2- | CLIP-1 | Cationic |
| hydroxyethyl)]-dimethylammonium chloride | | |
| rac-[2(2,3-Dihexadecyloxypropyloxymethyloxy) | CLIP-6 | Cationic |
| ethyl]trimethylammoniun bromide | | |
| Ethyldimyristoylphosphatidylcholine | EDMPC | Cationic |
| 1,2-Distearyloxy-N,N-dimethyl-3-aminopropane | DSDMA | Cationic |
| 1,2-Dimyristoyl-trimethylammonium propane | DMTAP | Cationic |
| O,O′-Dimyristyl-N-lysyl aspartate | DMKE | Cationic |
| 1,2-Distearoyl-sn-glycero-3-ethylphospho- | DSEPC | Cationic |
| choline | | |
| N-Palmitoyl D-erythro-sphingosyl | CCS | Cationic |
| carbamoyl-spenmine | | |
| N-t-Butyl-N0-tetradecyl-3- | diC14- | Cationic |
| tetradecylaminopropionamidine | amidine | |
| Octadecenolyoxy[ethyl-2-heptadecenyl-3 | DOTIM | Cationic |
| hydroxyethyl] imidazolinium chloride | | |
| N1-Cholesteryloxycarbonyl-3,7-diazanonane- | CDAN | Cationic |
| 1,9-diamine | | |
| 2-(3-Bis(3-amino-propyl)-amino]propylamino)- | RPR209120 | Cationic |
| Nditetradecylcarbamoylme-ethyl-acetamide | | |
| 1,2-dilinoleyloxy-3-dimethylaminopropane | DLinDMA | Cationic |
| 2,2-dilinoleyl-4-dimethylaminoethyl- | DLin-KC2- | Cationic |
| [1,3]-dioxolane | DMA | |
| dilinoleyl-methyl-4-dimethylaminobutyrate | DLin-MC3- | Cationic |
| | DMA | |

[0892] Exemplary polymers for use in nanoparticle formulations and/or gene transfer are shown in Table 49 below.

TABLE 49
Exemplary polymers for nanoparticle formulation or gene transfer

| Polymer | Abbreviation |
|---|---|
| Poly(ethylene)glycol | PEG |
| Polyethylenimine | PEI |
| Dithiobis (succinimidylpropionate) | DSP |
| Dimethyl-3,3′-dithiobispropionimidate | DTBP |
| Poly(ethylene imine)biscarbamate | PEIC |
| Poly(L-lysine) | PLL |
| Histidine modified PLL | |
| Poly(N-vinylpyrrolidone) | PVP |
| Poly(propylenimine) | PPI |
| Poly(amidoamine) | PAMAM |
| Poly(amidoethylenimine) | SS_PAEI |
| Triethylenetetramine | TETA |
| Poly(β-aminoester) | |
| Poly(4-hydroxy-L-proline ester) | PHP |
| Poly(allylamine) | |
| Poly(α-[4-aminobutyl]-L-glycolic acid) | PAGA |
| Poly(D,L-lactic-co-glycolic acid) | PLGA |
| Poly(N-ethyl-4-vinylpyridinium bromide) | |
| Poly(phosphazene)s | PPZ |
| Poly(phosphoester)s | PPE |
| Poly(phosphoramidate)s | PPA |
| Poly(N-2-hydroxypropylmethacrylamide) | pHPMA |
| Poly (2-(dimethylamino)ethyl methacrylate) | pDMAEMA |
| Poly(2-aminoethyl propylene phosphate) | PPE-EA |
| Chitosan | |
| Galactosylated chitosan | |
| N-dodacylated chitosam | |
| Histone | |
| Collagen | |
| Dextran-spermine | D-SPM |

[0893] Exemplary delivery methods for polynucleotides encoding prime editing composition components are shown in Table 50 below.

TABLE 50
Exemplary polynucleotide delivery methods

| | | Delivery | | | |
|---|---|---|---|---|---|
| | | into Non- | | | Type of |
| | | Dividing | Duration of | Genome | Molecule |
| Delivery | Vector/Mode | Cells | Expression | Integration | Delivered |
| Physical | (e.g., | YES | Transient | NO | Nucleic |
| | electroporation, | | | | Acids and |
| | particle gun, | | | | Proteins |
| | Calcium | | | | |
| | phosphate | | | | |
| | transfection) | | | | |
| Viral | Retrovirus | NO | Stable | YES | RNA |
| | Lentivirus | YES | Stable | YES/NO with | RNA |
| | | | | modification | |
| | Adenovirus | YES | Transient | NO | DNA |
| | Adeno-Associated | YES | Stable | NO | DNA |
| | Virus (AAV) | | | | |
| | Vaccinia Virus | YES | Very | NO | DNA |
| | | | Transient | | |
| | Herpes | YES | Stable | NO | DNA |
| | Simplex Virus | | | | |
| Non-Viral | Cationic | YES | Transient | Depends on | Nucleic |
| | | | | what is | acids and |
| | | | | delivered | Proteins |
| | Polymeric | YES | Transient | NO | Nucleic |
| | Nanoparticles | | | | Acids |
| Biological | Attenuated | YES | Transient | NO | Nucleic |
| | Bacteria | | | | Acids |
| Non-Viral | Engineered | YES | Transient | NO | Nucleic |
| Delivery | Bacteriophages | | | | Acids |
| Vehicles | Mammalian | YES | Transient | NO | Nucleic |
| | Virus-like | | | | Acids |
| | Particles | | | | |
| | Biological | YES | Transient | NO | Nucleic |
| | liposomes: | | | | Acids |
| | Erythrocyte | | | | |
| | Ghosts and | | | | |
| | Exosomes | | | | |

[0894] The prime editing compositions of the disclosure, whether introduced as polynucleotides or polypeptides, can be provided to the cells for about 30 minutes to about 24 hours, e.g., 1 hour, 1.5 hours, 2 hours, 2.5 hours, 3 hours, 3.5 hours 4 hours, 5 hours, 6 hours, 7 hours, 8 hours, 12 hours, 16 hours, 18 hours, 20 hours, or any other period from about 30 minutes to about 24 hours, which can be repeated with a frequency of about every day to about every 4 days, e.g., every 1.5 days, every 2 days, every 3 days, or any other frequency from about every day to about every four days. The compositions may be provided to the subject cells one or more times, e.g., one time, twice, three times, or more than three times, and the cells allowed to incubate with the agent(s) for some amount of time following each contacting event e.g., 16-24 hours. In cases in which two or more different prime editing system components, e.g., two different polynucleotide constructs are provided to the cell (e.g., different components of the same prime editing system, or two different guide nucleic acids that are complementary to different sequences within the same or different target genes), the compositions may be delivered simultaneously (e.g., as two polypeptides and/or nucleic acids). Alternatively, they may be provided sequentially, e.g., one composition being provided first, followed by a second composition.

[0895] The prime editing compositions and pharmaceutical compositions of the disclosure, whether introduced as polynucleotides or polypeptides, can be administered to subjects in need thereof for about 30 minutes to about 24 hours, e.g., 1 hour, 1.5 hours, 2 hours, 2.5 hours, 3 hours, 3.5 hours 4 hours, 5 hours, 6 hours, 7 hours, 8 hours, 12 hours, 16 hours, 18 hours, 20 hours, or any other period from about 30 minutes to about 24 hours, which can be repeated with a frequency of about every day to about every 4 days, e.g., every 1.5 days, every 2 days, every 3 days, or any other frequency from about every day to about every four days. The compositions may be provided to the subject one or more times, e.g., one time, twice, three times, or more than three times. In cases in which two or more different prime editing system components, e.g., two different polynucleotide constructs are administered to the subject (e.g., different components of the same prime editing system, or two different guide nucleic acids that are complementary to different sequences within the same or different target genes), the compositions may be administered simultaneously (e.g., as two polypeptides and/or nucleic acids). Alternatively, they may be provided sequentially, e.g., one composition being provided first, followed by a second composition.

[0896] The following embodiments are within the scope of the present disclosure. Furthermore, the disclosure encompasses all variations, combinations, and permutations of these embodiments in which one or more limitations, elements, clauses, and descriptive terms from one or more of the listed embodiments is introduced into another listed embodiment in this section. For example, any listed embodiment that is dependent on another embodiment can be modified to include one or more limitations found in any other listed embodiment in this section that is dependent on the same base embodiment.

[0897] Embodiment 1: In some embodiments, a prime editing composition of the present disclosure comprises: (A) a first prime editing guide RNA (PEgRNA) or one or more polynucleotides encoding the first PEgRNA, and (B) a second PEgRNA or one or more polynucleotides encoding the second PEgRNA; wherein the first PEgRNA comprises: (i) a first spacer that is complementary to a first search target sequence on a first strand of a DMPK gene; (ii) a first gRNA core capable of binding to a Cas9 protein; and (iii) a first extension arm comprising a first editing template and a first primer binding site (PBS); wherein the first spacer comprises at its 3′ end nucleotides 5-20 of a sequence selected from the group consisting of SEQ ID NOs: 1, 20, 39, 58, 77, 484, 518, 536, 554, 572, 590, 912, 929, 947, 965, 983, 1001, 1019, and 1341, and wherein the first PBS comprises at its 5′ end a sequence that is the reverse complement of nucleotides 15-17 of the selected sequence; wherein the second PEgRNA comprises: (i) a second spacer that is complementary to a second search target sequence on a second strand of the DMPK gene complementary to the first strand; (ii) a second gRNA core capable of binding to a Cas9 protein; and (iii) a second extension arm comprising a second editing template and a second PBS; wherein the second spacer comprises at its 3′ end nucleotides 5-20 of a sequence selected from the group consisting of SEQ ID NOs: 1359, 1381, 1403, 1503, 1525, 1864, 1882, 1900, 1918, 1936, 2263, 2281, 2299, 2317, 2335, 2353, 2673, and wherein the second PBS comprises at its 5′ end a sequence that is the reverse complement of nucleotides 15-17 of the selected sequence; and wherein (a) the first editing template comprises a region of complementarity to the second editing template; (b) the first editing template comprises nucleotides 8-17 of the selected sequence for the second spacer, and the second editing template comprises nucleotides 8-17 of the selected sequence for the first spacer; or (c) the first editing template comprises nucleotides 8-17 of the selected sequence for the second spacer, and a region of complementarity to the second editing template, and the second editing template comprises nucleotides 8-17 of the selected sequence for the first spacer, and a region of complementarity to the first editing template.

[0898] Embodiment 2: The prime editing composition of Embodiment 1, wherein the selected sequence for the first spacer is SEQ ID NOs: 77, 484, 536, 590, or 1019.

[0899] Embodiment 3: The prime editing composition of Embodiment 1 or 2, wherein the selected sequence for the second spacer is SEQ ID NO: 1525, 1900, 1936, 2263, 2281, 2299, 2353, or 2673.

[0900] Embodiment 4: The prime editing composition of any one of Embodiments 1-3, wherein the selected sequence for the first spacer is SEQ ID NO: 77, 536, or 1019.

[0901] Embodiment 5: The prime editing composition of any one of Embodiments 1-4, wherein the selected sequence for the second spacer is SEQ ID NO: 1900, 1936, or 2673.

[0902] Embodiment 6: The prime editing composition of any one of Embodiments 1-5, wherein the first spacer and/or the second spacer is from 16 to 22 nucleotides in length.

[0903] Embodiment 7: The prime editing composition of any one of Embodiments 1-6, wherein the first spacer and/or the second spacer comprises at its 3′ the selected sequence.

[0904] Embodiment 8: The prime editing composition of Embodiment 7, wherein the first spacer and/or the second spacer is 20 nucleotides in length and comprises the selected sequence.

[0905] Embodiment 9: The prime editing composition of any one of Embodiments 1-8, wherein the first gRNA core and the second gRNA core comprise the same sequence.

[0906] Embodiment 10: The prime editing composition of Embodiment 9, wherein the first gRNA core and the second gRNA core each comprises SEQ ID NO: 3641.

[0907] Embodiment 11: The prime editing composition of any one of Embodiments 1-10, wherein the first spacer, the first gRNA core, the first editing template, and the first PBS form a contiguous sequence in a single molecule.

[0908] Embodiment 12: The prime editing composition of Embodiment 11, wherein the first PEgRNA comprises from 5′ to 3′ the first spacer, the first gRNA core, the first editing template, and the first PBS.

[0909] Embodiment 13: The prime editing composition of any one of Embodiments 1-12, wherein the second spacer, the second gRNA core, the second editing template, and the second PBS form a contiguous sequence in a single molecule.

[0910] Embodiment 14: The prime editing composition of Embodiment 13, wherein the second pegRNA comprises from 5′ to 3′ the second spacer, the second gRNA core, the second editing template, and the second PBS.

[0911] Embodiment 15: The prime editing composition of any one of Embodiments 1-14, where in the first PBS is at least 8 nucleotides in length and comprises at its 5′ end a sequence that is the reverse complement of nucleotides 10-17 of the selected sequence for the first spacer.

[0912] Embodiment 16: The prime editing composition of Embodiment 15, wherein the first PBS is 8-17 nucleotides in length and comprises at its 5′ end a sequence that is the reverse complement of nucleotides 10-17, 9-17, 8-17, 7-17, 6-17, 5-17, 4-17, 3-17, 2-17, or 1-17 of the selected sequence for the first spacer.

[0913] Embodiment 17: The prime editing composition of Embodiment 16, wherein the first PBS is 8-14 nucleotides in length.

[0914] Embodiment 18: The prime editing composition of Embodiment 16, wherein the first PBS is 8-12 nucleotides in length.

[0915] Embodiment 19: The prime editing composition of Embodiment 16, wherein the first PBS is 8-10 nucleotides in length.

[0916] Embodiment 20: The prime editing composition of Embodiment 16, wherein the first PBS is 8-9 nucleotides in length.

[0917] Embodiment 21: The prime editing composition of Embodiment 16, wherein the first PBS is 10 nucleotides in length.

[0918] Embodiment 22: The prime editing composition of any one of Embodiments 1-21, where in the second PBS is at least 8 nucleotides in length and comprises at its 5′ end a sequence that is the reverse complement of nucleotides 10-17 of the selected sequence for the second spacer.

[0919] Embodiment 23: The prime editing composition of Embodiment 22, wherein the second PBS is 8-17 nucleotides in length and comprises at its 5′ end a sequence that is the reverse complement of nucleotides 10-17, 9-17, 8-17, 7-17, 6-17, 5-17, 4-17, 3-17, 2-17, or 1-17 of the selected sequence for the second spacer.

[0920] Embodiment 24: The prime editing composition of Embodiment 23, wherein the second PBS is 8-14 nucleotides in length.

[0921] Embodiment 25: The prime editing composition of Embodiment 23, wherein the second PBS is 8-12 nucleotides in length.

[0922] Embodiment 26: The prime editing composition of Embodiment 23, wherein the second PBS is 8-10 nucleotides in length.

[0923] Embodiment 27: The prime editing composition of Embodiment 23, wherein the second PBS is 8-9 nucleotides in length.

[0924] Embodiment 28: The prime editing composition of Embodiment 23, wherein the second PBS is 10 nucleotides in length.

[0925] Embodiment 29: The prime editing composition of any one of Embodiments 1-28, wherein the first editing template comprises a region of complementarity to the second editing template.

[0926] Embodiment 30: The prime editing composition of Embodiment 29, wherein the region of complementarity is about 20 to about 80 nucleotides in length.

[0927] In some embodiments, a prime editing composition of Embodiment 29 comprises a region of complementarity that is about 20, about 21, about 22, about 23, about 24, about 25, about 26, about 27, about 28, about 29, about 30, about 31, about 32, about 33, about 34, about 35, about 36, about 37, about 38, about 39, about 40, about 41, about 42, about 43, about 44, about 45, about 46, about 47, about 48, about 49, about 50, about 51, about 52, about 53, about 54, about 55, about 56, about 57, about 58, about 59, about 60, about 61, about 62, about 63, about 64, about 65, about 66, about 67, about 68, about 69, about 70, about 71, about 72, about 73, about 74, about 75, about 76, about 77, about 78, about 79, or about 80 nucleotides in length.

[0928] In some embodiments, a prime editing composition of Embodiment 29 comprises a region of complementarity that is between 20 and 80 nucleotides; between 21 and 80 nucleotides; between 22 and 80 nucleotides; between 23 and 80 nucleotides; between 24 and 80 nucleotides; between 25 and 80 nucleotides; between 26 and 80 nucleotides; between 27 and 80 nucleotides; between 28 and 80 nucleotides; between 29 and 80 nucleotides; between 30 and 80 nucleotides; between 31 and 80 nucleotides; between 32 and 80 nucleotides; between 33 and 80 nucleotides; between 34 and 80 nucleotides; between 35 and 80 nucleotides; between 36 and 80 nucleotides; between 37 and 80 nucleotides; between 38 and 80 nucleotides; between 39 and 80 nucleotides; between 40 and 80 nucleotides; between 41 and 80 nucleotides; between 42 and 80 nucleotides; between 43 and 80 nucleotides; between 44 and 80 nucleotides; between 45 and 80 nucleotides; between 46 and 80 nucleotides; between 47 and 80 nucleotides; between 48 and 80 nucleotides; between 49 and 80 nucleotides; between 50 and 80 nucleotides; between 51 and 80 nucleotides; between 52 and 80 nucleotides; between 53 and 80 nucleotides; between 54 and 80 nucleotides; between 55 and 80 nucleotides; between 56 and 80 nucleotides; between 57 and 80 nucleotides; between 58 and 80 nucleotides; between 59 and 80 nucleotides; between 60 and 80 nucleotides; between 61 and 80 nucleotides; between 62 and 80 nucleotides; between 63 and 80 nucleotides; between 64 and 80 nucleotides; between 65 and 80 nucleotides; between 66 and 80 nucleotides; between 67 and 80 nucleotides; between 68 and 80 nucleotides; between 69 and 80 nucleotides; between 70 and 80 nucleotides; between 71 and 80 nucleotides; between 72 and 80 nucleotides; between 73 and 80 nucleotides; between 74 and 80 nucleotides; between 75 and 80 nucleotides; between 76 and 80 nucleotides; between 77 and 80 nucleotides; between 78 and 80 nucleotides; between 20 and 80 nucleotides; between 20 and 79 nucleotides; between 20 and 78 nucleotides; between 20 and 77 nucleotides; between 20 and 76 nucleotides; between 20 and 75 nucleotides; between 20 and 74 nucleotides; between 20 and 73 nucleotides; between 20 and 72 nucleotides; between 20 and 71 nucleotides; between 20 and 70 nucleotides; between 20 and 69 nucleotides; between 20 and 68 nucleotides; between 20 and 67 nucleotides; between 20 and 66 nucleotides; between 20 and 65 nucleotides; between 20 and 64 nucleotides; between 20 and 63 nucleotides; between 20 and 62 nucleotides; between 20 and 61 nucleotides; between 20 and 60 nucleotides; between 20 and 59 nucleotides; between 20 and 58 nucleotides; between 20 and 57 nucleotides; between 20 and 56 nucleotides; between 20 and 55 nucleotides; between 20 and 54 nucleotides; between 20 and 53 nucleotides; between 20 and 52 nucleotides; between 20 and 51 nucleotides; between 20 and 50 nucleotides; between 20 and 49 nucleotides; between 20 and 48 nucleotides; between 20 and 47 nucleotides; between 20 and 46 nucleotides; between 20 and 45 nucleotides; between 20 and 44 nucleotides; between 20 and 43 nucleotides; between 20 and 42 nucleotides; between 20 and 41 nucleotides; between 20 and 40 nucleotides; between 20 and 39 nucleotides; between 20 and 38 nucleotides; between 20 and 37 nucleotides; between 20 and 36 nucleotides; between 20 and 35 nucleotides; between 20 and 34 nucleotides; between 20 and 33 nucleotides; between 20 and 32 nucleotides; between 20 and 31 nucleotides; between 20 and 30 nucleotides; between 20 and 29 nucleotides; between 20 and 28 nucleotides; between 20 and 27 nucleotides; between 20 and 26 nucleotides; between 20 and 25 nucleotides; between 20 and 24 nucleotides; between 20 and 23 nucleotides; or between 20 and 22 nucleotides in length.

[0929] In some embodiments, a prime editing composition of Embodiment 29 comprises a region of complementarity that is at least 20, at least 21, at least 22, at least 23, at least 24, at least 25, at least 26, at least 27, at least 28, at least 29, at least 30, at least 31, at least 32, at least 33, at least 34, at least 35, at least 36, at least 37, at least 38, at least 39, at least 40, at least 41, at least 42, at least 43, at least 44, at least 45, at least 46, at least 47, at least 48, at least 49, at least 50, at least 51, at least 52, at least 53, at least 54, at least 55, at least 56, at least 57, at least 58, at least 59, at least 60, at least 61, at least 62, at least 63, at least 64, at least 65, at least 66, at least 67, at least 68, at least 69, at least 70, at least 71, at least 72, at least 73, at least 74, at least 75, at least 76, at least 77, at least 78, at least 79, or at least 80 nucleotides in length.

[0930] In some embodiments, a prime editing composition of Embodiment 29 comprises a region of complementarity that is no more than 20, no more than 21, no more than 22, no more than 23, no more than 24, no more than 25, no more than 26, no more than 27, no more than 28, no more than 29, no more than 30, no more than 31, no more than 32, no more than 33, no more than 34, no more than 35, no more than 36, no more than 37, no more than 38, no more than 39, no more than 40, no more than 41, no more than 42, no more than 43, no more than 44, no more than 45, no more than 46, no more than 47, no more than 48, no more than 49, no more than 50, no more than 51, no more than 52, no more than 53, no more than 54, no more than 55, no more than 56, no more than 57, no more than 58, no more than 59, no more than 60, no more than 61, no more than 62, no more than 63, no more than 64, no more than 65, no more than 66, no more than 67, no more than 68, no more than 69, no more than 70, no more than 71, no more than 72, no more than 73, no more than 74, no more than 75, no more than 76, no more than 77, no more than 78, no more than 79, or no more than 80 nucleotides in length.

[0931] Embodiment 31: The prime editing composition of Embodiment 29, wherein the region of complementarity is about 20 to about 40 nucleotides in length.

[0932] Embodiment 32. The prime editing composition of Embodiment 29, wherein the region of complementarity is 23-38 nucleotides in length.

[0933] Embodiment 32a: The prime editing composition of Embodiment 29, wherein the region of complementarity is about 10-19 nucleotides in length.

[0934] Embodiment 32b: The prime editing composition of Embodiment 29, wherein the region of complementarity is 10-19 nucleotides in length.

[0935] Embodiment 32c: The prime editing composition of Embodiment 29, wherein the region of complementarity is about 20-29 nucleotides in length.

[0936] Embodiment 32d: The prime editing composition of Embodiment 29, wherein the region of complementarity is 20-29 nucleotides in length.

[0937] Embodiment 32e: The prime editing composition of Embodiment 29, wherein the region of complementarity is about 30-40 nucleotides in length.

[0938] Embodiment 32f: The prime editing composition of Embodiment, wherein the region of complementarity is 30-40 nucleotides in length.

[0939] Embodiment 33: The prime editing composition of Embodiment 29, wherein the GC content of the region of complementarity is about 40% to about 80%.

[0940] Embodiment 34: The prime editing composition of Embodiment 29, wherein the GC content of the region of complementarity is about 50% to about 80%.

[0941] Embodiment 35: The prime editing composition of Embodiment 29, wherein the GC content of the region of complementarity is about 60% to about 80%.

[0942] Embodiment 36: The prime editing composition of Embodiment 29, wherein the GC content of the region of complementarity is at least 63%.

[0943] Embodiment 37: The prime editing composition of Embodiment 29, wherein the GC content of the region of complementarity is 63%-79%.

[0944] Embodiment 37a: The prime editing composition of Embodiment 29, wherein the GC content of the region of complementarity is no more than about 45%.

[0945] Embodiment 37b: The prime editing composition of Embodiment 29, wherein the GC content of the region of complementarity is no more than 45%.

[0946] Embodiment 37c: The prime editing composition of Embodiment 29, wherein the GC content of the region of complementarity is about 45%-60%.

[0947] Embodiment 37d: The prime editing composition of Embodiment 29, wherein the GC content of the region of complementarity is 45%-60%.

[0948] Embodiment 37e: The prime editing composition of Embodiment 29, wherein the GC content of the region of complementarity is about 60%-75%.

[0949] Embodiment 37e: The prime editing composition of Embodiment 29, wherein the GC content of the region of complementarity is 60%-75%.

[0950] Embodiment 37f: The prime editing composition of Embodiment 29, wherein the GC content of the region of complementarity is at least about 75%.

[0951] Embodiment 37g: The prime editing composition of Embodiment 29, wherein the GC content of the region of complementarity is at least 75%.

[0952] Embodiment 38: The prime editing composition of any one of Embodiments 29-37, wherein the first editing template comprises SEQ ID NO: 2691.

[0953] Embodiment 39: The prime editing composition of any one of Embodiments 29-38, wherein the second editing template comprises SEQ ID NO: 3075.

[0954] Embodiment 40: The prime editing composition of any one of Embodiments 29-37, where in the first editing template comprises a sequence selected from the group consisting of SEQ ID NOs: 2692-2736.

[0955] Embodiment 41: The prime editing composition of any one of Embodiments 29-37 and 40, wherein the second editing template comprises a sequence selected from the group consisting of SEQ ID NOs: 3076-3120.

[0956] Embodiment 41a: The prime editing composition of any one of Embodiments 29-37, wherein the first editing template comprises a sequence selected from the group consisting of SEQ ID NOs: 2692-2700.

[0957] Embodiment 41b: The prime editing composition of any one of Embodiments 29-37 and 41a, wherein the second editing template comprises a sequence selected from the group consisting of SEQ ID NOs: 3076-3084.

[0958] Embodiment 41c: The prime editing composition of any one of Embodiments 29-37, wherein the first editing template comprises a sequence selected from the group consisting of SEQ ID NOs: 2701-2709.

[0959] Embodiment 41d: The prime editing composition of any one of Embodiments 29-37 and 41c, wherein the second editing template comprises a sequence selected from the group consisting of SEQ ID NOs: 3085-3093.

[0960] Embodiment 41e: The prime editing composition of any one of Embodiments 29-37, wherein the first editing template comprises a sequence selected from the group consisting of SEQ ID NOs: 2710-2718.

[0961] Embodiment 41f: The prime editing composition of any one of Embodiments 29-37 and 41e, wherein the second editing template comprises a sequence selected from the group consisting of SEQ ID NOs: 3094-3102.

[0962] Embodiment 41g: The prime editing composition of any one of Embodiments 29-37, wherein the first editing template comprises a sequence selected from the group consisting of SEQ ID NOs: 2719-2727.

[0963] Embodiment 41h: The prime editing composition of any one of Embodiments 29-37 and 41g, wherein the second editing template comprises a sequence selected from the group consisting of SEQ ID NOs: 3103-3111.

[0964] Embodiment 41i: The prime editing composition of any one of Embodiments 29-37, wherein the first editing template comprises a sequence selected from the group consisting of SEQ ID NOs: 2728-2736.

[0965] Embodiment 41j: The prime editing composition of any one of Embodiments 29-37 and 41i, wherein the second editing template comprises a sequence selected from the group consisting of SEQ ID NOs: 3112-3120.

[0966] Embodiment 42: The prime editing composition of any one of Embodiments 29-37, wherein the first editing template comprises a sequence selected from the group consisting of SEQ ID NOs: 2737-2769.

[0967] Embodiment 43: The prime editing composition of any one of Embodiments 29-37 and 42, wherein the second editing template comprises a sequence selected from the group consisting of SEQ ID NOs: 3121-3153.

[0968] Embodiment 43a: The prime editing composition of any one of Embodiments 29-37, wherein the first editing template comprises a sequence selected from the group consisting of SEQ ID NOs: 2737-2745 and 2769.

[0969] Embodiment 43b: The prime editing composition of any one of Embodiments 29-37 and 43a, wherein the second editing template comprises a sequence selected from the group consisting of SEQ ID NOs: 3121-3129 and 3153.

[0970] Embodiment 43c: The prime editing composition of any one of Embodiments 29-37, wherein the first editing template comprises a sequence selected from the group consisting of SEQ ID NOs: 2746-2749.

[0971] Embodiment 43d: The prime editing composition of any one of Embodiments 29-37 and 43c, wherein the second editing template comprises a sequence selected from the group consisting of SEQ ID NOs: 3130-3133.

[0972] Embodiment 43e: The prime editing composition of any one of Embodiments 29-37, wherein the first editing template comprises a sequence selected from the group consisting of SEQ ID NOs: 2750-2758.

[0973] Embodiment 43f: The prime editing composition of any one of Embodiments 29-37 and 43e, wherein the second editing template comprises a sequence selected from the group consisting of SEQ ID NOs: 3134-3142.

[0974] Embodiment 43g: The prime editing composition of any one of Embodiments 29-37, wherein the first editing template comprises a sequence selected from the group consisting of SEQ ID NOs: 2759-2768.

[0975] Embodiment 43h: The prime editing composition of any one of Embodiments 29-37 and 43g, wherein the second editing template comprises a sequence selected from the group consisting of SEQ ID NOs: 3143-3152.

[0976] Embodiment 43i: The prime editing composition of any one of Embodiments 29-37g, wherein the first editing template comprises a sequence selected from the group consisting of SEQ ID NOs: 2770-3074.

[0977] Embodiment 43j: The prime editing composition of any one of Embodiments 29-37g, wherein the second editing template comprises a sequence selected from the group consisting of SEQ ID NOs: 3154-3458.

[0978] Embodiment 43k: The prime editing composition of Embodiment 43i or 43j, wherein the region of complementarity is 10 to 19 nt in length and has a GC content of at least about 75%.

[0979] Embodiment 43l: The prime editing composition of Embodiment 43k, wherein the first editing template comprises SEQ ID NOs: 2796 or 2804.

[0980] Embodiment 43m: The prime editing composition of Embodiment 43k or 43l, wherein the second editing template comprises SEQ ID NO: 3180 or 3188.

[0981] Embodiment 43n: The prime editing composition of Embodiment 43k, wherein the first editing template comprises a sequence selected from the group consisting of SEQ ID NOs: 2895, 3008, 3011, 2847, 2859, and 2864.

[0982] Embodiment 43o: The prime editing composition of Embodiment 43k or 43n, wherein the second editing template comprises a sequence selected from the group consisting of SEQ ID NOs: 3279, 3392, 3395, 3231, 3243, and 3248.

[0983] Embodiment 43p: The prime editing composition of Embodiment 43i or 43j, wherein the region of complementarity is 10 to 19 nt in length and has a GC content of about 45%-60%.

[0984] Embodiment 43q: The prime editing composition of Embodiment 43p, wherein the first editing template comprises SEQ ID NOs: 2792 or 3014.

[0985] Embodiment 43r: The prime editing composition of Embodiment 43p or 43q, wherein the second editing template comprises SEQ ID NOs: 3176 or 3398:

[0986] Embodiment 43s. The prime editing composition of Embodiment 43p, wherein the first editing template comprises a sequence selected from the group consisting of SEQ ID NOs: 2819, 2786, and 2835.

[0987] Embodiment 43t. The prime editing composition of Embodiment 43p or 43s, wherein the second editing template comprises a sequence selected from the group consisting of SEQ ID NOs: 3203, 3170, and 3219.

[0988] Embodiment 43u: The prime editing composition of Embodiment 43i or 43j, wherein the region of complementarity is 10 to 19 nt in length and has a GC content of less than about 45%.

[0989] Embodiment 43v: The prime editing composition of Embodiment 43u, wherein the first editing template comprises SEQ ID NO: 2770 or 2803.

[0990] Embodiment 43w: The prime editing composition of Embodiment 43u or 43v, wherein the second editing template comprises SEQ ID NO: 3154 or 3187.

[0991] Embodiment 43x: The prime editing composition of Embodiment 43u, wherein the first editing template comprises a sequence selected from the group consisting of SEQ ID NOs: 2812, 2929, and 2797.

[0992] Embodiment 43v: The prime editing composition of Embodiment 43u or 43x, wherein the second editing template comprises a sequence selected from the group consisting of SEQ ID NOs: 3196, 3313, and 3181.

[0993] Embodiment 43z: The prime editing composition of Embodiment 43i or 43j, wherein the region of complementarity is 10 to 19 nt in length and has a GC content of about 60%-75%.

[0994] Embodiment 43aa: The prime editing composition of Embodiment 43z, wherein the first editing template comprises SEQ ID NOs: 2781 or 2977.

[0995] Embodiment 43bb: The prime editing composition of Embodiment 43z or 43aa, wherein the second editing template comprises a SEQ ID NOs: 3165 or 3361.

[0996] Embodiment 43cc: The prime editing composition of Embodiment 43z, wherein the first editing template comprises a sequence selected from the group consisting of SEQ ID NOs: 2802, 2823, 2939, 2831, and 2909.

[0997] Embodiment 43dd: The prime editing composition of Embodiment 43z or 43cc, wherein the second editing template comprises a sequence selected from the group consisting of SEQ ID NOs: 3186, 3207, 3323, 3215, and 3293.

[0998] Embodiment 43ee: The prime editing composition of Embodiment 43i or 43j, wherein the region of complementarity is 20-30 nt in length and has a GC content of at least about 75%.

[0999] Embodiment 43ff: The prime editing composition of Embodiment 43ee, wherein the first editing template comprises SEQ ID NO: 2851

[1000] Embodiment 43gg: The prime editing composition of Embodiment 43ee or 43ff, wherein the second editing template comprises SEQ ID NO: 3235.

[1001] Embodiment 43hh: The prime editing composition of Embodiment 43i or 43j, wherein the region of complementarity is 20-30 nt in length and has a GC content of about 45%-60%.

[1002] Embodiment 43ii: The prime editing composition of Embodiment 43hh, wherein the first editing template comprises SEQ ID NOs: 2924 or 3066.

[1003] Embodiment 43jj: The prime editing composition of Embodiment 43hh or 43ii, wherein the second editing template comprises SEQ ID NOs: 3308 or 3450.

[1004] Embodiment 43kk: The prime editing composition of Embodiment 43hh, wherein the first editing template comprises a sequence selected from the group consisting of SEQ ID NOs: 2925, 2995, 2950, and 2978.

[1005] Embodiment 43ll: The prime editing composition of Embodiment 43hh or 43kk, wherein the second editing template comprises a sequence selected from the group consisting of SEQ ID NOs: 3309, 3379, 3334, and 3362.

[1006] Embodiment 43 mm: The prime editing composition of Embodiment 43i or 43j, wherein the region of complementarity is 20 to 30 nt in length and has a GC content of less than about 45%.

[1007] Embodiment 43nn: The prime editing composition of Embodiment 43 mm, wherein the first editing template comprises SEQ ID NOs: 2777 or 3032.

[1008] Embodiment 43oo: The prime editing composition of Embodiment 43 mm or 43nn, wherein the second editing template comprises SEQ ID NO:3161 or 3416.

[1009] Embodiment 43pp: The prime editing composition of Embodiment 43 mm, wherein the first editing template comprises a sequence selected from the group consisting of SEQ ID NOs: 3040, 3072, and 2773.

[1010] Embodiment 43qq: The prime editing composition of Embodiment 43 mm or 43pp, wherein the second editing template comprises a sequence selected from the group consisting of SEQ ID NOs: 3424, 3456, and 3157.

[1011] Embodiment 43rr: The prime editing composition of Embodiment 43i or 43j, wherein the region of complementarity is 20 to 30 nt in length and has a GC content of about 60%-75%.

[1012] Embodiment 43ss: The prime editing composition of Embodiment 43rr, wherein the first editing template comprises SEQ ID No 2980 or 3039.

[1013] Embodiment 43tt: The prime editing composition of Embodiment 43rr or 43ss, wherein the second editing template comprises a sequence selected from the group consisting of SEQ ID NOs: 3364 or 3423.

[1014] Embodiment 43uu: The prime editing composition of Embodiment 43rr, wherein the first editing template comprises SEQ ID NOs: 2997 or 2849.

[1015] Embodiment 43vv: The prime editing composition of Embodiment 43rr or 43uu, wherein the second editing template SEQ ID NOs: 3381, or 3233.

[1016] Embodiment 43ww: The prime editing composition of Embodiment 43i or 43j, wherein the region of complementarity is at least 30 nt in length and has a GC content of about 45%-60%, optionally wherein the region of complementarity is 30 to 40 nt in length.

[1017] Embodiment 43xx: The prime editing composition of Embodiment 43ww, wherein the first editing template comprises SEQ ID NO: 3013.

[1018] Embodiment 43vv: The prime editing composition of Embodiment 43ww or 43xx, wherein the second editing template comprises a sequence selected from the group consisting of SEQ ID NO: 3397.

[1019] Embodiment 43zz: The prime editing composition of Embodiment 43yy, wherein the first editing template comprises SEQ ID NO: 2820 or 2976.

[1020] Embodiment 43aaa: The prime editing composition of Embodiment 43yy or 43zz, wherein the second editing template comprises SEQ ID NO: 3204 or 3360.

[1021] Embodiment 43bbb: The prime editing composition of Embodiment 43i or 43j, wherein the region of complementarity is at least 30 nt in length and has a GC content of less than about 45%, optionally wherein the region of complementarity is 30 to 40 nt in length.

[1022] Embodiment 43ccc: The prime editing composition of Embodiment 43bbb, wherein the first editing template comprises SEQ ID NO: 2943 or 3020.

[1023] Embodiment 43ddd: The prime editing composition of Embodiment 43bbb or 43ccc, wherein the second editing template comprises a sequence selected from the group consisting of SEQ ID NOs: 3327 or 3404.

[1024] Embodiment 43eee: The prime editing composition of Embodiment 43bbb, wherein the first editing template comprises SEQ ID NO: 2778 or 3061.

[1025] Embodiment 43fff: The prime editing composition of Embodiment 43bbb or 43eee, wherein the second editing template comprises SEQ ID NOs: 3162 or 3445.

[1026] Embodiment 44: The prime editing composition of any one of Embodiments 29-43, wherein: (i) the first spacer comprises SEQ ID NO: 77, and the first PBS comprises SEQ ID No: 85; (ii) the first spacer comprises SEQ ID NO: 536, and the first PBS comprises SEQ ID No: 544; or (iii) the first spacer comprises SEQ ID NO: 1019, and the first PBS comprises SEQ ID No:1027; and wherein: (i) the second spacer comprises SEQ ID NO: 1900, and the second PBS comprises SEQ ID NO: 1908; (ii) the second spacer comprises SEQ ID NO: 1936, and the second PBS comprises SEQ ID NO: 1944; or (iii) the second spacer comprises SEQ ID NO: 2673, and the second PBS comprises SEQ ID NO: 2681.

[1027] Embodiment 45: The prime editing composition of any one of Embodiments 29-43, wherein the first spacer comprises SEQ ID No: 77, and the first PBS is 8-10 nucleotides in length and comprises SEQ ID NOs: 87, 86, or 85.

[1028] Embodiment 46: The prime editing composition of Embodiment 45, wherein the second spacer comprises SEQ ID NO: 1936, and the second PBS is 8-10 nucleotides in length and comprises SEQ ID NOs: 1946, 1945, or 1944.

[1029] Embodiment 47: The prime editing composition of any one of Embodiments 44-46, wherein the first PEgRNA comprises a sequence selected from the group consisting of SEQ ID NOs: 93-102, 552, 553, 1035, and 1036, and wherein the second PEgRNA comprises a sequence selected from the group consisting of SEQ ID NOs: 1952-1961, 1916, 1917, 2689, and 2690.

[1030] Embodiment 48: The prime editing composition of any one of Embodiments 44-47, wherein the first PEgRNA comprises a sequence selected from the group consisting of SEQ ID NOs: 94, 552, and 1035; and wherein the second PEgRNA comprises a sequence selected from the group consisting of 1952, 1916, and 2689.

[1031] Embodiment 49: The prime editing composition of any one of Embodiments 29-48, wherein the first editing template and the second editing template have the same length and are perfectly complementary to each other.

[1032] Embodiment 49a: The prime editing composition of Embodiment 29, wherein the first spacer comprises at its 3′ end nucleotides 5-20 of SEQ ID NO: 77, and wherein the first editing template comprises a sequence selected from the group consisting of SEQ ID NOs: 2771, 2800, 2811, 2775, 2778, 2820, 2990, 2776, 2779, 2780, 2786, 2799, 2802, 2812, 2819, 2937, 2996, 3010, 3041, 3044, 3058, 2813, 3068, 3070, and 3072.

[1033] Embodiment 49b: The prime editing composition of Embodiment 29, wherein the first spacer comprises at its 3′ end nucleotides 5-20 of SEQ ID NO: 1019, and wherein the first editing template comprises a sequence selected from the group consisting of SEQ ID NOs: 2795, 2949, 2816, 2775, 2778, 2820, 2990, 2776, 2779, 2780, 2786, 2799, 2802, 2812, 2819, 2937, 2996, 3010, 3041, 2813, 3068, 3070, and 3072.

[1034] Embodiment 49c: The prime editing composition of Embodiment 29, wherein the first spacer comprises at its 3′ end nucleotides 5-20 of SEQ ID NO: 590, and wherein the first editing template comprises a sequence selected from the group consisting of SEQ ID NOs: 2774, 2834, 2896, 2940, 2962, 3009, 30302816, 2776, 2779, 2780, 2786, 2799, 2802, 2812, 2819, 2937, 2996, 3010, 3041, 3044, 3058, and 3072.

[1035] Embodiment 49d: The prime editing composition of any one of Embodiments 29 and 49a-49c, wherein the second spacer comprises at its 3′ end nucleotides 5-20 of SEQ ID NO: 1525, and wherein the second editing template comprises a sequence selected from the group consisting of SEQ ID NOs: 3195, 3158, 3414, 3393, 3162, 3204, 3164, 3170, 3203, 3380, 3425, 3442, 3197, 3454, 3159, 3186, 3196, 3456, 3280, 3160, and 3163.

[1036] Embodiment 49e: The prime editing composition of any one of Embodiments 29 and 49a-49c, wherein the second spacer comprises at its 3′ end nucleotides 5-20 of SEQ ID NO: 1936, and wherein the second editing template comprises a sequence selected from the group consisting of SEQ ID NOs: 3184, 3218, 3346, 3321, 3428, 3452, 3393, 3162, 3204, 3164, 3170, 3203, 3380, 3425, 3442, 3197, 3454, 3159, 3186, 3196, and 3456.

[1037] Embodiment 49f: The prime editing composition of any one of Embodiments 29 and 49a-49c, wherein the second spacer comprises at its 3′ end nucleotides 5-20 of SEQ ID NO: 2353, and wherein the second editing template comprises a sequence selected from the group consisting of SEQ ID NOs: 3155, 3324, 3179, 3333, 3200, 3374, 3183, 3394, 3452, 3393, 3162, 3204, 3164, 3170, 3203, 3380, 3425, 3442, 3197, 3454, 3280, 3160, and 3163.

[1038] Embodiment 49k: The prime editing composition of any one of Embodiments 29-49f, wherein the first editing template and the second editing template have the same length and are perfectly complementary to each other.

[1039] Embodiment 50: The prime editing composition of any one of Embodiments 1-28, wherein the first editing template comprises at its 3′ end nucleotides 8-17 of the selected sequence for the second spacer, and wherein the second editing template comprises at its 3′ end nucleotides 8-17 of the selected sequence of the first spacer.

[1040] Embodiment 51: The prime editing composition of Embodiment 50, wherein the first editing template comprises at its 3′ end nucleotides 1-17, 2-17, 3-17, 4-17, 5-17, 6-17, 7-17, or 8-17 of the selected sequence for the second spacer, and/or wherein the second editing template comprises at its 3′ end nucleotides 1-17, 2-17, 3-17, 4-17, 5-17, 6-17, 7-17, or 8-17 of the selected sequence for the first spacer.

[1041] Embodiment 52: The prime editing composition of Embodiment 50, wherein the first editing template comprises at its 3′ end nucleotides 3-17 of the selected sequence for the second spacer, and wherein the second editing template comprises at its 3′ end nucleotides 3-17 of the selected sequence of the first spacer.

[1042] Embodiment 53: The prime editing composition of Embodiment 52, wherein the first editing template comprises a region of complementarity to a sequence on the second strand of the DMPK gene that is directly 3′ to nucleotide 3 of the second search target sequence, wherein the region of complementarity is about 20, about 25, about 30 about 35, about 40, about 45, about 50 nucleotides in length.

[1043] In some embodiments, a prime editing composition of Embodiment 52 comprises a first editing template that comprises a region of complementarity to a sequence on the second strand of the DMPK gene that is directly 3′ to nucleotide 3 of the second search target sequence, wherein the region of complementarity is about 20, about 21, about 22, about 23, about 24, about 25, about 26, about 27, about 28, about 29, about 30, about 31, about 32, about 33, about 34, about 35, about 36, about 37, about 38, about 39, about 40, about 41, about 42, about 43, about 44, about 45, about 46, about 47, about 48, about 49, or about 50 nucleotides in length.

[1044] In some embodiments, a prime editing composition of Embodiment 52 comprises a first editing template that comprises a region of complementarity to a sequence on the second strand of the DMPK gene that is directly 3′ to nucleotide 3 of the second search target sequence, wherein the region of complementarity is between 20 and 50 nucleotides; between 21 and 50 nucleotides; between 22 and 50 nucleotides; between 23 and 50 nucleotides; between 24 and 50 nucleotides; between 25 and 50 nucleotides; between 26 and 50 nucleotides; between 27 and 50 nucleotides; between 28 and 50 nucleotides; between 29 and 50 nucleotides; between 30 and 50 nucleotides; between 31 and 50 nucleotides; between 32 and 50 nucleotides; between 33 and 50 nucleotides; between 34 and 50 nucleotides; between 35 and 50 nucleotides; between 36 and 50 nucleotides; between 37 and 50 nucleotides; between 38 and 50 nucleotides; between 39 and 50 nucleotides; between 40 and 50 nucleotides; between 41 and 50 nucleotides; between 42 and 50 nucleotides; between 43 and 50 nucleotides; between 44 and 50 nucleotides; between 45 and 50 nucleotides; between 46 and 50 nucleotides; between 47 and 50 nucleotides; between 48 and 50 nucleotides; between 20 and 50 nucleotides; between 20 and 49 nucleotides; between 20 and 48 nucleotides; between 20 and 47 nucleotides; between 20 and 46 nucleotides; between 20 and 45 nucleotides; between 20 and 44 nucleotides; between 20 and 43 nucleotides; between 20 and 42 nucleotides; between 20 and 41 nucleotides; between 20 and 40 nucleotides; between 20 and 39 nucleotides; between 20 and 38 nucleotides; between 20 and 37 nucleotides; between 20 and 36 nucleotides; between 20 and 35 nucleotides; between 20 and 34 nucleotides; between 20 and 33 nucleotides; between 20 and 32 nucleotides; between 20 and 31 nucleotides; between 20 and 30 nucleotides; between 20 and 29 nucleotides; between 20 and 28 nucleotides; between 20 and 27 nucleotides; between 20 and 26 nucleotides; between 20 and 25 nucleotides; between 20 and 24 nucleotides; between 20 and 23 nucleotides; or between 20 and 22 nucleotides in length.

[1045] In some embodiments, a prime editing composition of Embodiment 52 comprises a first editing template that comprises a region of complementarity to a sequence on the second strand of the DMPK gene that is directly 3′ to nucleotide 3 of the second search target sequence, wherein the region of complementarity is at least 20, at least 21, at least 22, at least 23, at least 24, at least 25, at least 26, at least 27, at least 28, at least 29, at least 30, at least 31, at least 32, at least 33, at least 34, at least 35, at least 36, at least 37, at least 38, at least 39, at least 40, at least 41, at least 42, at least 43, at least 44, at least 45, at least 46, at least 47, at least 48, at least 49, or at least 50 nucleotides in length.

[1046] In some embodiments, a prime editing composition of Embodiment 52 comprises a first editing template that comprises a region of complementarity to a sequence on the second strand of the DMPK gene that is directly 3′ to nucleotide 3 of the second search target sequence, wherein the region of complementarity is no more than 20, no more than 21, no more than 22, no more than 23, no more than 24, no more than 25, no more than 26, no more than 27, no more than 28, no more than 29, no more than 30, no more than 31, no more than 32, no more than 33, no more than 34, no more than 35, no more than 36, no more than 37, no more than 38, no more than 39, no more than 40, no more than 41, no more than 42, no more than 43, no more than 44, no more than 45, no more than 46, no more than 47, no more than 48, no more than 49, or no more than 50 nucleotides in length.

[1047] Embodiment 54: The prime editing composition of Embodiment 53, wherein the region of complementarity is about 20-30 nucleotides in length.

[1048] Embodiment 55: The prime editing composition of Embodiment 52, wherein the second editing template comprises a region of complementarity to a sequence on the first strand of the DMPK gene that is directly 3′ to nucleotide 3 of the first search target sequence, wherein the region of complementarity is about 20, about 25, about 30, about 35, about 40, about 45, or about 50 nucleotides in length.

[1049] Embodiment 56: The prime editing composition of Embodiment 55, wherein the region of complementarity is about 20-30 nucleotides in length.

[1050] Embodiment 57: The prime editing composition of any one of Embodiments 50-56, wherein the first editing template comprises a sequence selected from the group consisting of SEQ ID NOs: 3459-3461, wherein the second spacer comprises at its 3′ end nucleotides 5-20 of SEQ ID NO: 1525, optionally wherein the second spacer comprises at its 3 end SEQ ID NO: 1525.

[1051] Embodiment 57a. The prime editing composition of any one of Embodiments 50-56, wherein the first editing template comprises a sequence selected from the group consisting of SEQ ID NOs: 3467-3471, wherein the second spacer comprises at its 3′ end nucleotides 5-20 of SEQ ID NO: 1525, optionally wherein the second spacer comprises at its 3 end SEQ ID NO: 1525.

[1052] Embodiment 57b. The prime editing composition of any one of Embodiments 50-56, wherein the first editing template comprises a sequence selected from the group consisting of SEQ ID NOs: 3462-3466, and wherein the second spacer comprises at its 3′ end nucleotides 5-20 of SEQ ID NO: 2353, optionally wherein the second spacer comprises at its 3 end SEQ ID NO: 2353.

[1053] Embodiment 57c. The prime editing composition of any one of Embodiments 50-56, wherein the first editing template comprises a sequence selected from the group consisting of SEQ ID NOs: 3472-3476, wherein the second spacer comprises at its 3′ end nucleotides 5-20 of SEQ ID NO: 1936, optionally wherein the second spacer comprises at its 3 end SEQ ID NO: 1936.

[1054] Embodiment 57d. The prime editing composition of any one of Embodiments 50-56, wherein the first editing template comprises nucleotides 31-40, 30-40, 29-40, 28-40, 27-40, 26-40, 25-40, 24-40, 23-40, 22-40, 21-40, 20-40, 19-40, 18-40, 17-40, 16-40, 15-40, 14-40, 13-40, 12-40, 11-40, 10-40, 9-40, 8-40, 7-40, 6-40, 5-40, 4-40, 3-40, 2-40, or 1-40 of SEQ ID NO: 3647, wherein the second spacer comprises at its 3′ end nucleotides 5-20 of SEQ ID NO:1900, optionally wherein the second spacer comprises at its 3′ end SEQ ID NO: 1900.

[1055] Embodiment 57e. The prime editing composition of any one of Embodiments 50-56, wherein the first editing template comprises nucleotides 31-40, 30-40, 29-40, 28-40, 27-40, 26-40, 25-40, 24-40, 23-40, 22-40, 21-40, 20-40, 19-40, 18-40, 17-40, 16-40, 15-40, 14-40, 13-40, 12-40, 11-40, 10-40, 9-40, 8-40, 7-40, 6-40, 5-40, 4-40, 3-40, 2-40, or 1-40 of SEQ ID NO: 3648, wherein the second spacer comprises at its 3′ end nucleotides 5-20 of SEQ ID NO: 1918, optionally wherein the second spacer comprises at its 3′ end SEQ ID NO: 1918.

[1056] Embodiment 57f. The prime editing composition of any one of Embodiments 50-56, wherein the first editing template comprises nucleotides 31-40, 30-40, 29-40, 28-40, 27-40, 26-40, 25-40, 24-40, 23-40, 22-40, 21-40, 20-40, 19-40, 18-40, 17-40, 16-40, 15-40, 14-40, 13-40, 12-40, 11-40, 10-40, 9-40, 8-40, 7-40, 6-40, 5-40, 4-40, 3-40, 2-40, or 1-40 of SEQ ID NO: 3649, wherein the second spacer comprises at its 3′ end nucleotides 5-20 of SEQ ID NO: 1403, optionally wherein the second spacer comprises at its 3′ end SEQ ID NO: 1403.

[1057] Embodiment 57g. The prime editing composition of any one of Embodiments 50-56, wherein the first editing template comprises nucleotides 31-40, 30-40, 29-40, 28-40, 27-40, 26-40, 25-40, 24-40, 23-40, 22-40, 21-40, 20-40, 19-40, 18-40, 17-40, 16-40, 15-40, 14-40, 13-40, 12-40, 11-40, 10-40, 9-40, 8-40, 7-40, 6-40, 5-40, 4-40, 3-40, 2-40, or 1-40 of SEQ ID NO: 3650, wherein the second spacer comprises at its 3′ end nucleotides 5-20 of SEQ ID NO: 1936, optionally wherein the second spacer comprises at its 3′ end SEQ ID NO: 1936.

[1058] Embodiment 57h. The prime editing composition of any one of Embodiments 50-56, wherein the first editing template comprises nucleotides 31-40, 30-40, 29-40, 28-40, 27-40, 26-40, 25-40, 24-40, 23-40, 22-40, 21-40, 20-40, 19-40, 18-40, 17-40, 16-40, 15-40, 14-40, 13-40, 12-40, 11-40, 10-40, 9-40, 8-40, 7-40, 6-40, 5-40, 4-40, 3-40, 2-40, or 1-40 of SEQ ID NO: 3651, wherein the second spacer comprises at its 3′ end nucleotides 5-20 of SEQ ID NO: 2263, optionally wherein the second spacer comprises at its 3′ end SEQ ID NO: 2263.

[1059] Embodiment 57i. The prime editing composition of any one of Embodiments 50-56, wherein the first editing template comprises nucleotides 31-40, 30-40, 29-40, 28-40, 27-40, 26-40, 25-40, 24-40, 23-40, 22-40, 21-40, 20-40, 19-40, 18-40, 17-40, 16-40, 15-40, 14-40, 13-40, 12-40, 11-40, 10-40, 9-40, 8-40, 7-40, 6-40, 5-40, 4-40, 3-40, 2-40, or 1-40 of SEQ ID NO: 3652, wherein the second spacer comprises at its 3′ end nucleotides 5-20 of SEQ ID NO: 2353, optionally wherein the second spacer comprises at its 3′ end SEQ ID NO: 2353.

[1060] Embodiment 57j. The prime editing composition of any one of Embodiments 50-56, wherein the first editing template comprises nucleotides 31-40, 30-40, 29-40, 28-40, 27-40, 26-40, 25-40, 24-40, 23-40, 22-40, 21-40, 20-40, 19-40, 18-40, 17-40, 16-40, 15-40, 14-40, 13-40, 12-40, 11-40, 10-40, 9-40, 8-40, 7-40, 6-40, 5-40, 4-40, 3-40, 2-40, or 1-40 of SEQ ID NO: 3653, wherein the second spacer comprises at its 3′ end nucleotides 5-20 of SEQ ID NO: 1503, optionally wherein the second spacer comprises at its 3′ end SEQ ID NO: 1503.

[1061] Embodiment 57k. The prime editing composition of any one of Embodiments 50-56, wherein the first editing template comprises nucleotides 31-40, 30-40, 29-40, 28-40, 27-40, 26-40, 25-40, 24-40, 23-40, 22-40, 21-40, 20-40, 19-40, 18-40, 17-40, 16-40, 15-40, 14-40, 13-40, 12-40, 11-40, 10-40, 9-40, 8-40, 7-40, 6-40, 5-40, 4-40, 3-40, 2-40, or 1-40 of SEQ ID NO: 3654, wherein the second spacer comprises at its 3′ end nucleotides 5-20 of SEQ ID NO: 2281, optionally wherein the second spacer comprises at its 3′ end SEQ ID NO: 2281.

[1062] Embodiment 57l. The prime editing composition of any one of Embodiments 50-56, wherein the first editing template comprises nucleotides 31-40, 30-40, 29-40, 28-40, 27-40, 26-40, 25-40, 24-40, 23-40, 22-40, 21-40, 20-40, 19-40, 18-40, 17-40, 16-40, 15-40, 14-40, 13-40, 12-40, 11-40, 10-40, 9-40, 8-40, 7-40, 6-40, 5-40, 4-40, 3-40, 2-40, or 1-40 of SEQ ID NO: 3655, wherein the second spacer comprises at its 3′ end nucleotides 5-20 of SEQ ID NO: 2673, optionally wherein the second spacer comprises at its 3′ end SEQ ID NO: 2673.

[1063] Embodiment 57m. The prime editing composition of any one of Embodiments 50-56, wherein the first editing template comprises nucleotides 31-40, 30-40, 29-40, 28-40, 27-40, 26-40, 25-40, 24-40, 23-40, 22-40, 21-40, 20-40, 19-40, 18-40, 17-40, 16-40, 15-40, 14-40, 13-40, 12-40, 11-40, 10-40, 9-40, 8-40, 7-40, 6-40, 5-40, 4-40, 3-40, 2-40, or 1-40 of SEQ ID NO: 3656, wherein the second spacer comprises at its 3′ end nucleotides 5-20 of SEQ ID NO: 1525, optionally wherein the second spacer comprises at its 3′ end SEQ ID NO: 1525.

[1064] Embodiment 57n. The prime editing composition of any one of Embodiments 50-56, wherein the first editing template comprises nucleotides 31-40, 30-40, 29-40, 28-40, 27-40, 26-40, 25-40, 24-40, 23-40, 22-40, 21-40, 20-40, 19-40, 18-40, 17-40, 16-40, 15-40, 14-40, 13-40, 12-40, 11-40, 10-40, 9-40, 8-40, 7-40, 6-40, 5-40, 4-40, 3-40, 2-40, or 1-40 of SEQ ID NO: 3657, wherein the second spacer comprises at its 3′ end nucleotides 5-20 of SEQ ID NO: 2299, optionally wherein the second spacer comprises at its 3′ end SEQ ID NO: 2299.

[1065] Embodiment 57o. The prime editing composition of any one of Embodiments 50-56, wherein the first editing template comprises nucleotides 31-40, 30-40, 29-40, 28-40, 27-40, 26-40, 25-40, 24-40, 23-40, 22-40, 21-40, 20-40, 19-40, 18-40, 17-40, 16-40, 15-40, 14-40, 13-40, 12-40, 11-40, 10-40, 9-40, 8-40, 7-40, 6-40, 5-40, 4-40, 3-40, 2-40, or 1-40 of SEQ ID NO: 3658, wherein the second spacer comprises at its 3′ end nucleotides 5-20 of SEQ ID NO: 2317, optionally wherein the second spacer comprises at its 3′ end SEQ ID NO: 2317.

[1066] Embodiment 57p. The prime editing composition of any one of Embodiments 50-56, wherein the first editing template comprises nucleotides 31-40, 30-40, 29-40, 28-40, 27-40, 26-40, 25-40, 24-40, 23-40, 22-40, 21-40, 20-40, 19-40, 18-40, 17-40, 16-40, 15-40, 14-40, 13-40, 12-40, 11-40, 10-40, 9-40, 8-40, 7-40, 6-40, 5-40, 4-40, 3-40, 2-40, or 1-40 of SEQ ID NO: 3659, wherein the second spacer comprises at its 3′ end nucleotides 5-20 of SEQ ID NO: 1864, optionally wherein the second spacer comprises at its 3′ end SEQ ID NO: 1864.

[1067] Embodiment 57g. The prime editing composition of any one of Embodiments 50-56, wherein the first editing template comprises nucleotides 31-40, 30-40, 29-40, 28-40, 27-40, 26-40, 25-40, 24-40, 23-40, 22-40, 21-40, 20-40, 19-40, 18-40, 17-40, 16-40, 15-40, 14-40, 13-40, 12-40, 11-40, 10-40, 9-40, 8-40, 7-40, 6-40, 5-40, 4-40, 3-40, 2-40, or 1-40 of SEQ ID NO: 3660, wherein the second spacer comprises at its 3′ end nucleotides 5-20 of SEQ ID NO: 1359, optionally wherein the second spacer comprises at its 3′ end SEQ ID NO: 1359.

[1068] Embodiment 57r. The prime editing composition of any one of Embodiments 50-56, wherein the first editing template comprises nucleotides 31-40, 30-40, 29-40, 28-40, 27-40, 26-40, 25-40, 24-40, 23-40, 22-40, 21-40, 20-40, 19-40, 18-40, 17-40, 16-40, 15-40, 14-40, 13-40, 12-40, 11-40, 10-40, 9-40, 8-40, 7-40, 6-40, 5-40, 4-40, 3-40, 2-40, or 1-40 of SEQ ID NO: 3661, wherein the second spacer comprises at its 3′ end nucleotides 5-20 of SEQ ID NO: 2335, optionally wherein the second spacer comprises at its 3′ end SEQ ID NO: 2335.

[1069] Embodiment 57s. The prime editing composition of any one of Embodiments 50-56, wherein the first editing template comprises nucleotides 31-40, 30-40, 29-40, 28-40, 27-40, 26-40, 25-40, 24-40, 23-40, 22-40, 21-40, 20-40, 19-40, 18-40, 17-40, 16-40, 15-40, 14-40, 13-40, 12-40, 11-40, 10-40, 9-40, 8-40, 7-40, 6-40, 5-40, 4-40, 3-40, 2-40, or 1-40 of SEQ ID NO: 3662, wherein the second spacer comprises at its 3′ end nucleotides 5-20 of SEQ ID NO: 1882, optionally wherein the second spacer comprises at its 3′ end SEQ ID NO: 1882.

[1070] Embodiment 57t. The prime editing composition of any one of Embodiments 50-56, wherein the first editing template comprises nucleotides 31-40, 30-40, 29-40, 28-40, 27-40, 26-40, 25-40, 24-40, 23-40, 22-40, 21-40, 20-40, 19-40, 18-40, 17-40, 16-40, 15-40, 14-40, 13-40, 12-40, 11-40, 10-40, 9-40, 8-40, 7-40, 6-40, 5-40, 4-40, 3-40, 2-40, or 1-40 of SEQ ID NO: 3663, wherein the second spacer comprises at its 3′ end nucleotides 5-20 of SEQ ID NO: 1381, optionally wherein the second spacer comprises at its 3′ end SEQ ID NO: 1381.

[1071] Embodiment 58: The prime editing composition of any one of Embodiments 50-57, wherein the second editing template comprises a sequence selected from the group consisting of SEQ ID NOs: 3477-3479, wherein the first spacer comprises at its 3′ end nucleotides 5-20 of SEQ ID NO: 484, optionally wherein the first spacer comprises at its 3′ end SEQ ID NO: 484.

[1072] Embodiment 58a. The prime editing composition of any one of Embodiments 50-58, wherein the second editing template comprises a sequence selected from the group consisting of SEQ ID NOs: 3480-3484, wherein the first spacer comprises at its 3′ end nucleotides 5-20 of SEQ ID NO: 77, optionally wherein the first spacer comprises at its 3 end SEQ ID NO: 77.

[1073] Embodiment 58b. The prime editing composition of any one of Embodiments 50-58, wherein the second editing template comprises a sequence selected from the group consisting of SEQ ID NOs: 3485-3489, wherein the first spacer comprises at its 3′ end nucleotides 5-20 of SEQ ID NO: 590, optionally wherein the first spacer comprises at its 3 end SEQ ID NO: 590.

[1074] Embodiment 58c. The prime editing composition of any one of Embodiments 50-58, wherein the second editing template comprises a sequence selected from the group consisting of SEQ ID NOs: 3490-3494, wherein the first spacer comprises at its 3′ end nucleotides 5-20 of SEQ ID NO: 1019, optionally wherein the first spacer comprises at its 3 end SEQ ID NO: 1019.

[1075] Embodiment 58d. The prime editing composition of any one of Embodiments 50-58, wherein the second editing template comprises nucleotides 31-40, 30-40, 29-40, 28-40, 27-40, 26-40, 25-40, 24-40, 23-40, 22-40, 21-40, 20-40, 19-40, 18-40, 17-40, 16-40, 15-40, 14-40, 13-40, 12-40, 11-40, 10-40, 9-40, 8-40, 7-40, 6-40, 5-40, 4-40, 3-40, 2-40, or 1-40 of SEQ ID NO: 3664, wherein the second spacer comprises at its 3′ end nucleotides 5-20 of SEQ ID NO:518, optionally wherein the second spacer comprises at its 3′ end SEQ ID NO:518.

[1076] Embodiment 58e. The prime editing composition of any one of Embodiments 50-58, wherein the second editing template comprises nucleotides 31-40, 30-40, 29-40, 28-40, 27-40, 26-40, 25-40, 24-40, 23-40, 22-40, 21-40, 20-40, 19-40, 18-40, 17-40, 16-40, 15-40, 14-40, 13-40, 12-40, 11-40, 10-40, 9-40, 8-40, 7-40, 6-40, 5-40, 4-40, 3-40, 2-40, or 1-40 of SEQ ID NO:3665, wherein the second spacer comprises at its 3′ end nucleotides 5-20 of SEQ ID NO:536, optionally wherein the second spacer comprises at its 3′ end SEQ ID NO:536.

[1077] Embodiment 58f: The prime editing composition of any one of Embodiments 50-58, wherein the second editing template comprises nucleotides 31-40, 30-40, 29-40, 28-40, 27-40, 26-40, 25-40, 24-40, 23-40, 22-40, 21-40, 20-40, 19-40, 18-40, 17-40, 16-40, 15-40, 14-40, 13-40, 12-40, 11-40, 10-40, 9-40, 8-40, 7-40, 6-40, 5-40, 4-40, 3-40, 2-40, or 1-40 of SEQ ID NO:3666, wherein the second spacer comprises at its 3′ end nucleotides 5-20 of SEQ ID NO:554, optionally wherein the second spacer comprises at its 3′ end SEQ ID NO:554.

[1078] Embodiment 58g: The prime editing composition of any one of Embodiments 50-58, wherein the second editing template comprises nucleotides 31-40, 30-40, 29-40, 28-40, 27-40, 26-40, 25-40, 24-40, 23-40, 22-40, 21-40, 20-40, 19-40, 18-40, 17-40, 16-40, 15-40, 14-40, 13-40, 12-40, 11-40, 10-40, 9-40, 8-40, 7-40, 6-40, 5-40, 4-40, 3-40, 2-40, or 1-40 of SEQ ID NO:3667, wherein the second spacer comprises at its 3′ end nucleotides 5-20 of SEQ ID NO:572, optionally wherein the second spacer comprises at its 3′ end SEQ ID NO:572.

[1079] Embodiment 58h: The prime editing composition of any one of Embodiments 50-58, wherein the second editing template comprises nucleotides 31-40, 30-40, 29-40, 28-40, 27-40, 26-40, 25-40, 24-40, 23-40, 22-40, 21-40, 20-40, 19-40, 18-40, 17-40, 16-40, 15-40, 14-40, 13-40, 12-40, 11-40, 10-40, 9-40, 8-40, 7-40, 6-40, 5-40, 4-40, 3-40, 2-40, or 1-40 of SEQ ID NO:3668, wherein the second spacer comprises at its 3′ end nucleotides 5-20 of SEQ ID NO:590, optionally wherein the second spacer comprises at its 3′ end SEQ ID NO:590.

[1080] Embodiment 58i: The prime editing composition of any one of Embodiments 50-58, wherein the second editing template comprises nucleotides 31-40, 30-40, 29-40, 28-40, 27-40, 26-40, 25-40, 24-40, 23-40, 22-40, 21-40, 20-40, 19-40, 18-40, 17-40, 16-40, 15-40, 14-40, 13-40, 12-40, 11-40, 10-40, 9-40, 8-40, 7-40, 6-40, 5-40, 4-40, 3-40, 2-40, or 1-40 of SEQ ID NO:3669, wherein the second spacer comprises at its 3′ end nucleotides 5-20 of SEQ ID NO:39, optionally wherein the second spacer comprises at its 3′ end SEQ ID NO:39.

[1081] Embodiment 58j: The prime editing composition of any one of Embodiments 50-58, wherein the second editing template comprises nucleotides 31-40, 30-40, 29-40, 28-40, 27-40, 26-40, 25-40, 24-40, 23-40, 22-40, 21-40, 20-40, 19-40, 18-40, 17-40, 16-40, 15-40, 14-40, 13-40, 12-40, 11-40, 10-40, 9-40, 8-40, 7-40, 6-40, 5-40, 4-40, 3-40, 2-40, or 1-40 of SEQ ID NO:3670, wherein the second spacer comprises at its 3′ end nucleotides 5-20 of SEQ ID NO:912, optionally wherein the second spacer comprises at its 3′ end SEQ ID NO:912.

[1082] Embodiment 58k: The prime editing composition of any one of Embodiments 50-58, wherein the second editing template comprises nucleotides 31-40, 30-40, 29-40, 28-40, 27-40, 26-40, 25-40, 24-40, 23-40, 22-40, 21-40, 20-40, 19-40, 18-40, 17-40, 16-40, 15-40, 14-40, 13-40, 12-40, 11-40, 10-40, 9-40, 8-40, 7-40, 6-40, 5-40, 4-40, 3-40, 2-40, or 1-40 of SEQ ID NO:3671, wherein the second spacer comprises at its 3′ end nucleotides 5-20 of SEQ ID NO:929, optionally wherein the second spacer comprises at its 3′ end SEQ ID NO:929.

[1083] Embodiment 58l: The prime editing composition of any one of Embodiments 50-58, wherein the second editing template comprises nucleotides 31-40, 30-40, 29-40, 28-40, 27-40, 26-40, 25-40, 24-40, 23-40, 22-40, 21-40, 20-40, 19-40, 18-40, 17-40, 16-40, 15-40, 14-40, 13-40, 12-40, 11-40, 10-40, 9-40, 8-40, 7-40, 6-40, 5-40, 4-40, 3-40, 2-40, or 1-40 of SEQ ID NO:3672, wherein the second spacer comprises at its 3′ end nucleotides 5-20 of SEQ ID NO:947, optionally wherein the second spacer comprises at its 3′ end SEQ ID NO:947.

[1084] Embodiment 58m: The prime editing composition of any one of Embodiments 50-58, wherein the second editing template comprises nucleotides 31-40, 30-40, 29-40, 28-40, 27-40, 26-40, 25-40, 24-40, 23-40, 22-40, 21-40, 20-40, 19-40, 18-40, 17-40, 16-40, 15-40, 14-40, 13-40, 12-40, 11-40, 10-40, 9-40, 8-40, 7-40, 6-40, 5-40, 4-40, 3-40, 2-40, or 1-40 of SEQ ID NO:3673, wherein the second spacer comprises at its 3′ end nucleotides 5-20 of SEQ ID NO:965, optionally wherein the second spacer comprises at its 3′ end SEQ ID NO:965.

[1085] Embodiment 58n: The prime editing composition of any one of Embodiments 50-58, wherein the second editing template comprises nucleotides 31-40, 30-40, 29-40, 28-40, 27-40, 26-40, 25-40, 24-40, 23-40, 22-40, 21-40, 20-40, 19-40, 18-40, 17-40, 16-40, 15-40, 14-40, 13-40, 12-40, 11-40, 10-40, 9-40, 8-40, 7-40, 6-40, 5-40, 4-40, 3-40, 2-40, or 1-40 of SEQ ID NO:3674, wherein the second spacer comprises at its 3′ end nucleotides 5-20 of SEQ ID NO:983, optionally wherein the second spacer comprises at its 3′ end SEQ ID NO:983.

[1086] Embodiment 58o: The prime editing composition of any one of Embodiments 50-58, wherein the second editing template comprises nucleotides 31-40, 30-40, 29-40, 28-40, 27-40, 26-40, 25-40, 24-40, 23-40, 22-40, 21-40, 20-40, 19-40, 18-40, 17-40, 16-40, 15-40, 14-40, 13-40, 12-40, 11-40, 10-40, 9-40, 8-40, 7-40, 6-40, 5-40, 4-40, 3-40, 2-40, or 1-40 of SEQ ID NO: 3675, wherein the second spacer comprises at its 3′ end nucleotides 5-20 of SEQ ID NO:1001, optionally wherein the second spacer comprises at its 3′ end SEQ ID NO:1001.

[1087] Embodiment 58p: The prime editing composition of any one of Embodiments 50-58, wherein the second editing template comprises nucleotides 31-40, 30-40, 29-40, 28-40, 27-40, 26-40, 25-40, 24-40, 23-40, 22-40, 21-40, 20-40, 19-40, 18-40, 17-40, 16-40, 15-40, 14-40, 13-40, 12-40, 11-40, 10-40, 9-40, 8-40, 7-40, 6-40, 5-40, 4-40, 3-40, 2-40, or 1-40 of SEQ ID NO:3676, wherein the second spacer comprises at its 3′ end nucleotides 5-20 of SEQ ID NO:1019, optionally wherein the second spacer comprises at its 3′ end SEQ ID NO:1019.

[1088] Embodiment 58a: The prime editing composition of any one of Embodiments 50-58, wherein the second editing template comprises nucleotides 31-40, 30-40, 29-40, 28-40, 27-40, 26-40, 25-40, 24-40, 23-40, 22-40, 21-40, 20-40, 19-40, 18-40, 17-40, 16-40, 15-40, 14-40, 13-40, 12-40, 11-40, 10-40, 9-40, 8-40, 7-40, 6-40, 5-40, 4-40, 3-40, 2-40, or 1-40 of SEQ ID NO:3677, wherein the second spacer comprises at its 3′ end nucleotides 5-20 of SEQ ID NO:1341, optionally wherein the second spacer comprises at its 3′ end SEQ ID NO:1341.

[1089] Embodiment 58r: The prime editing composition of any one of Embodiments 50-58, wherein the second editing template comprises nucleotides 31-40, 30-40, 29-40, 28-40, 27-40, 26-40, 25-40, 24-40, 23-40, 22-40, 21-40, 20-40, 19-40, 18-40, 17-40, 16-40, 15-40, 14-40, 13-40, 12-40, 11-40, 10-40, 9-40, 8-40, 7-40, 6-40, 5-40, 4-40, 3-40, 2-40, or 1-40 of SEQ ID NO:3678, wherein the second spacer comprises at its 3′ end nucleotides 5-20 of SEQ ID NO:20, optionally wherein the second spacer comprises at its 3′ end SEQ ID NO:20.

[1090] Embodiment 58s: The prime editing composition of any one of Embodiments 50-58, wherein the second editing template comprises nucleotides 31-40, 30-40, 29-40, 28-40, 27-40, 26-40, 25-40, 24-40, 23-40, 22-40, 21-40, 20-40, 19-40, 18-40, 17-40, 16-40, 15-40, 14-40, 13-40, 12-40, 11-40, 10-40, 9-40, 8-40, 7-40, 6-40, 5-40, 4-40, 3-40, 2-40, or 1-40 of SEQ ID NO:3679, wherein the second spacer comprises at its 3′ end nucleotides 5-20 of SEQ ID NO:77, optionally wherein the second spacer comprises at its 3′ end SEQ ID NO:77.

[1091] Embodiment 58t: The prime editing composition of any one of Embodiments 50-58, wherein the second editing template comprises nucleotides 31-40, 30-40, 29-40, 28-40, 27-40, 26-40, 25-40, 24-40, 23-40, 22-40, 21-40, 20-40, 19-40, 18-40, 17-40, 16-40, 15-40, 14-40, 13-40, 12-40, 11-40, 10-40, 9-40, 8-40, 7-40, 6-40, 5-40, 4-40, 3-40, 2-40, or 1-40 of SEQ ID NO:3680, wherein the second spacer comprises at its 3′ end nucleotides 5-20 of SEQ ID NO:484, optionally wherein the second spacer comprises at its 3′ end SEQ ID NO:484.

[1092] Embodiment 58u: The prime editing composition of any one of Embodiments 50-58, wherein the second editing template comprises nucleotides 31-40, 30-40, 29-40, 28-40, 27-40, 26-40, 25-40, 24-40, 23-40, 22-40, 21-40, 20-40, 19-40, 18-40, 17-40, 16-40, 15-40, 14-40, 13-40, 12-40, 11-40, 10-40, 9-40, 8-40, 7-40, 6-40, 5-40, 4-40, 3-40, 2-40, or 1-40 of SEQ ID NO:3681, wherein the second spacer comprises at its 3′ end nucleotides 5-20 of SEQ ID NO:58, optionally wherein the second spacer comprises at its 3′ end SEQ ID NO:58.

[1093] Embodiment 58v: The prime editing composition of any one of Embodiments 50-58, wherein the second editing template comprises nucleotides 31-40, 30-40, 29-40, 28-40, 27-40, 26-40, 25-40, 24-40, 23-40, 22-40, 21-40, 20-40, 19-40, 18-40, 17-40, 16-40, 15-40, 14-40, 13-40, 12-40, 11-40, 10-40, 9-40, 8-40, 7-40, 6-40, 5-40, 4-40, 3-40, 2-40, or 1-40 of SEQ ID NO:3682, wherein the second spacer comprises at its 3′ end nucleotides 5-20 of SEQ ID NO:1, optionally wherein the second spacer comprises at its 3′ end SEQ ID NO:1.

[1094] Embodiment 59: The prime editing composition of Embodiment 57 or 58, wherein the first PEgRNA comprises a sequence selected from the group consisting of SEQ ID NOs: 503-517, and wherein the second PEgRNA comprises a sequence selected from the group consisting of SEQ ID NOs: 1548-1562.

[1095] Embodiment 60: The prime editing composition of any one of Embodiments 1-28, wherein the first editing template comprises from 5′ to 3′ (i) a region of complementarity to the second editing template and (ii) nucleotides 8-17 of the selected sequence for the second spacer; and wherein the second editing template comprises from 5′ to 3′ (i) a region of complementarity to the first editing template and (ii) nucleotides 8-17 of the selected sequence for the first spacer.

[1096] Embodiment 61: The prime editing composition of Embodiment 60, wherein the first editing template comprises nucleotides 1-17, 2-17, 3-17, 4-17, 5-17, 6-17, 7-17, or 8-17 of the selected sequence for the second spacer, and/or wherein the second editing template comprises 1-17, 2-17, 3-17, 4-17, 5-17, 6-17, 7-17, or 8-17 of the selected sequence for the first spacer.

[1097] Embodiment 62: The prime editing composition of Embodiment 60, wherein the first editing template comprises nucleotides 3-17 of the selected sequence for the second spacer, and wherein the second editing template comprises nucleotides 3-17 of the selected sequence of the first spacer.

[1098] Embodiment 63: The prime editing composition of Embodiment 60, wherein the first editing template comprises a region of complementarity to a sequence on the second strand of the DMPK gene that is directly 3′ to nucleotide 3 of the second search target sequence, wherein the region of complementarity is about 20, about 25, about 30, about 35, about 40, about 45, or about 50 nucleotides in length.

[1099] Embodiment 64: The prime editing composition of Embodiment 63, wherein the region of complementarity between the first editing template and the sequence on the second strand of the DMPK gene is about 20-30 nucleotides in length.

[1100] Embodiment 65: The prime editing composition of Embodiment 60, wherein the second editing template comprises a region of complementarity to a sequence on the first strand of the DMPK gene that is directly 3′ to nucleotide 3 of the first search target sequence, wherein the region of complementarity is about 20, about 25, about 30, about 35, about 40, about 45, or about 50 nucleotides in length.

[1101] Embodiment 66: The prime editing composition of Embodiment 65, wherein the region of complementarity between the second editing template and the sequence on the first strand of the DMPK gene is about 20-30 nucleotides in length.

[1102] Embodiment 67: The prime editing composition of any one of Embodiments 60-66, wherein the region of complementarity between the first editing template and the second editing template is about 20 to about 80 nucleotides in length.

[1103] In some embodiments, a prime editing composition of any one of Embodiments 60-66 comprises a region of complementarity between the first editing template and the second editing template that is about 20, about 21, about 22, about 23, about 24, about 25, about 26, about 27, about 28, about 29, about 30, about 31, about 32, about 33, about 34, about 35, about 36, about 37, about 38, about 39, about 40, about 41, about 42, about 43, about 44, about 45, about 46, about 47, about 48, about 49, about 50, about 51, about 52, about 53, about 54, about 55, about 56, about 57, about 58, about 59, about 60, about 61, about 62, about 63, about 64, about 65, about 66, about 67, about 68, about 69, about 70, about 71, about 72, about 73, about 74, about 75, about 76, about 77, about 78, about 79, or about 80 nucleotides in length.

[1104] In some embodiments, a prime editing composition of any one of Embodiments 60-66 comprises a region of complementarity between the first editing template and the second editing template that is between 20 and 80 nucleotides; between 21 and 80 nucleotides; between 22 and 80 nucleotides; between 23 and 80 nucleotides; between 24 and 80 nucleotides; between 25 and 80 nucleotides; between 26 and 80 nucleotides; between 27 and 80 nucleotides; between 28 and 80 nucleotides; between 29 and 80 nucleotides; between 30 and 80 nucleotides; between 31 and 80 nucleotides; between 32 and 80 nucleotides; between 33 and 80 nucleotides; between 34 and 80 nucleotides; between 35 and 80 nucleotides; between 36 and 80 nucleotides; between 37 and 80 nucleotides; between 38 and 80 nucleotides; between 39 and 80 nucleotides; between 40 and 80 nucleotides; between 41 and 80 nucleotides; between 42 and 80 nucleotides; between 43 and 80 nucleotides; between 44 and 80 nucleotides; between 45 and 80 nucleotides; between 46 and 80 nucleotides; between 47 and 80 nucleotides; between 48 and 80 nucleotides; between 49 and 80 nucleotides; between 50 and 80 nucleotides; between 51 and 80 nucleotides; between 52 and 80 nucleotides; between 53 and 80 nucleotides; between 54 and 80 nucleotides; between 55 and 80 nucleotides; between 56 and 80 nucleotides; between 57 and 80 nucleotides; between 58 and 80 nucleotides; between 59 and 80 nucleotides; between 60 and 80 nucleotides; between 61 and 80 nucleotides; between 62 and 80 nucleotides; between 63 and 80 nucleotides; between 64 and 80 nucleotides; between 65 and 80 nucleotides; between 66 and 80 nucleotides; between 67 and 80 nucleotides; between 68 and 80 nucleotides; between 69 and 80 nucleotides; between 70 and 80 nucleotides; between 71 and 80 nucleotides; between 72 and 80 nucleotides; between 73 and 80 nucleotides; between 74 and 80 nucleotides; between 75 and 80 nucleotides; between 76 and 80 nucleotides; between 77 and 80 nucleotides; between 78 and 80 nucleotides; between 20 and 80 nucleotides; between 20 and 79 nucleotides; between 20 and 78 nucleotides; between 20 and 77 nucleotides; between 20 and 76 nucleotides; between 20 and 75 nucleotides; between 20 and 74 nucleotides; between 20 and 73 nucleotides; between 20 and 72 nucleotides; between 20 and 71 nucleotides; between 20 and 70 nucleotides; between 20 and 69 nucleotides; between 20 and 68 nucleotides; between 20 and 67 nucleotides; between 20 and 66 nucleotides; between 20 and 65 nucleotides; between 20 and 64 nucleotides; between 20 and 63 nucleotides; between 20 and 62 nucleotides; between 20 and 61 nucleotides; between 20 and 60 nucleotides; between 20 and 59 nucleotides; between 20 and 58 nucleotides; between 20 and 57 nucleotides; between 20 and 56 nucleotides; between 20 and 55 nucleotides; between 20 and 54 nucleotides; between 20 and 53 nucleotides; between 20 and 52 nucleotides; between 20 and 51 nucleotides; between 20 and 50 nucleotides; between 20 and 49 nucleotides; between 20 and 48 nucleotides; between 20 and 47 nucleotides; between 20 and 46 nucleotides; between 20 and 45 nucleotides; between 20 and 44 nucleotides; between 20 and 43 nucleotides; between 20 and 42 nucleotides; between 20 and 41 nucleotides; between 20 and 40 nucleotides; between 20 and 39 nucleotides; between 20 and 38 nucleotides; between 20 and 37 nucleotides; between 20 and 36 nucleotides; between 20 and 35 nucleotides; between 20 and 34 nucleotides; between 20 and 33 nucleotides; between 20 and 32 nucleotides; between 20 and 31 nucleotides; between 20 and 30 nucleotides; between 20 and 29 nucleotides; between 20 and 28 nucleotides; between 20 and 27 nucleotides; between 20 and 26 nucleotides; between 20 and 25 nucleotides; between 20 and 24 nucleotides; between 20 and 23 nucleotides; or between 20 and 22 nucleotides in length.

[1105] In some embodiments, a prime editing composition of any one of Embodiments 60-66 comprises a region of complementarity between the first editing template and the second editing template that is at least 20, at least 21, at least 22, at least 23, at least 24, at least 25, at least 26, at least 27, at least 28, at least 29, at least 30, at least 31, at least 32, at least 33, at least 34, at least 35, at least 36, at least 37, at least 38, at least 39, at least 40, at least 41, at least 42, at least 43, at least 44, at least 45, at least 46, at least 47, at least 48, at least 49, at least 50, at least 51, at least 52, at least 53, at least 54, at least 55, at least 56, at least 57, at least 58, at least 59, at least 60, at least 61, at least 62, at least 63, at least 64, at least 65, at least 66, at least 67, at least 68, at least 69, at least 70, at least 71, at least 72, at least 73, at least 74, at least 75, at least 76, at least 77, at least 78, at least 79, or at least 80 nucleotides in length.

[1106] In some embodiments, a prime editing composition of any one of Embodiments 60-66 comprises a region of complementarity between the first editing template and the second editing template that is no more than 20, no more than 21, no more than 22, no more than 23, no more than 24, no more than 25, no more than 26, no more than 27, no more than 28, no more than 29, no more than 30, no more than 31, no more than 32, no more than 33, no more than 34, no more than 35, no more than 36, no more than 37, no more than 38, no more than 39, no more than 40, no more than 41, no more than 42, no more than 43, no more than 44, no more than 45, no more than 46, no more than 47, no more than 48, no more than 49, no more than 50, no more than 51, no more than 52, no more than 53, no more than 54, no more than 55, no more than 56, no more than 57, no more than 58, no more than 59, no more than 60, no more than 61, no more than 62, no more than 63, no more than 64, no more than 65, no more than 66, no more than 67, no more than 68, no more than 69, no more than 70, no more than 71, no more than 72, no more than 73, no more than 74, no more than 75, no more than 76, no more than 77, no more than 78, no more than 79, or no more than 80 nucleotides in length.

[1107] Embodiment 68: The prime editing composition of Embodiment 67, wherein the region of complementarity between the first editing template and the second editing template is about 20 to about 40 nucleotides in length.

[1108] Embodiment 69: The prime editing composition of Embodiment 67, wherein the region of complementarity between the first editing template and the second editing template is 23-38 nucleotides in length.

[1109] Embodiment 70: A prime editing composition comprising: a first prime editing guide RNA (PEgRNA) or one or more polynucleotides encoding the first PEgRNA and a second PEgRNA or one or more polynucleotides encoding the second PEgRNA, wherein (a) the first PEgRNA comprises: (i) a first spacer comprising at its 3′ end nucleotides 5-20 of a Spacer sequence selected from any one of Tables 1A, 2A, 3A, 4A, 5A, 6A, 7A, 8A, 9A, 10A, 11A, 12A, 13A, 14A, 15A, 16A, 17A, 18A, and 19A; (ii) a first gRNA core capable of binding to a Cas9 protein; (iii) a first extension arm comprising: a first primer binding site (PBS) comprising a PBS sequence selected from the same Table as the first spacer, and a first editing template comprising an RTT sequence selected from Table 37 and has an RTT Paring NO: x in Table 37; and (b) the second PEgRNA comprises: (i) a second spacer comprising at its 3′ end nucleotides 5-20 of a Spacer sequence selected from any one of Tables 20A, 21A, 22A, 23A, 24A, 25A, 26A, 27A, 28A, 29A, 30A, 31A, 32A, 33A, 34A, 35A, and 36A; (ii) a second gRNA core capable of binding to a Cas9 protein; (iii) a second extension arm comprising: a second primer binding site (PBS) comprising a PBS sequence selected from the same Table as the second spacer, and a second editing template comprising an RTT sequence selected from Table 38 and has an RTT paring NO: x in Table 38; wherein the RTT paring number x in (a) and (b) are the same integer.

[1110] Embodiment 71: The prime editing composition of Embodiment 70, wherein the first editing template and the second editing template have the same length and are perfectly complementary to each other.

[1111] Embodiment 72: A prime editing composition comprising a first prime editing guide RNA (PEgRNA) or a one or more polynucleotides encoding the first PEgRNA and a second PEgRNA or one or more polynucleotides encoding the second PEgRNA, wherein (a) the first PEgRNA comprises: (i) a first spacer comprising at its 3′ end nucleotides 5-20 of a Spacer sequence selected from Table xA, wherein x is an integer from 1 to 19; (ii) a first gRNA core capable of binding to a Cas9 protein; (iii) a first extension arm comprising: a first primer binding site (PBS) comprising a PBS sequence selected from the same Table as the first spacer, and a first editing template comprising an RTT sequence selected from Table 39, wherein the Paring Spacer number of the RTT sequence in Table 39 is y; and (b) the second PEgRNA comprises: (iv) a second spacer comprising at its 3′ end nucleotides 5-20 of a Spacer sequence selected from Table yA, wherein y is an integer from 20 to 36; (v) a second gRNA core capable of binding to a Cas9 protein; (vi) a second extension arm comprising: a second editing template comprising an RTT sequence selected from Table 40, wherein the Paring Spacer number of the RTT sequence in Table 40 is x, and a second primer binding site (PBS) comprising a PBS sequence selected from the same Table as the second spacer, wherein x in (a) and (b) are the same integer, and wherein y in (a) and (b) are the same integer.

[1112] Embodiment 73: The prime editing composition of any one of Embodiments 70-72, wherein the first spacer and/or the second spacer is from 16 to 22 nucleotides in length.

[1113] Embodiment 74: The prime editing composition of any one of Embodiments 70-73, wherein the first spacer and/or the second spacer comprises at its 3′ the selected sequence.

[1114] Embodiment 75: The prime editing composition of Embodiment 74, wherein the first spacer and/or the second spacer is 20 nucleotides in length.

[1115] Embodiment 76: The prime editing composition of any one of Embodiments 70-75, wherein the first gRNA core and the second gRNA core comprise the same sequence.

[1116] Embodiment 77: The prime editing composition of Embodiment 76, wherein the first gRNA core and the second gRNA core each comprises SEQ ID NO: 3641.

[1117] Embodiment 78: The prime editing composition of any one of Embodiments 70-77, wherein the first spacer, the first gRNA core, the first editing template, and the first PBS form a contiguous sequence in a single molecule.

[1118] Embodiment 79: The prime editing composition of Embodiment 78, wherein the first pegRNA comprises from 5′ to 3′ the first spacer, the first gRNA core, the first editing template, and the first PBS.

[1119] Embodiment 80: The prime editing composition of any one of Embodiments 70-79, wherein the second spacer, the second gRNA core, the second editing template, and the second PBS form a contiguous sequence in a single molecule.

[1120] Embodiment 81: The prime editing composition of Embodiment 80, wherein the second pegRNA comprises from 5′ to 3′ the second spacer, the second gRNA core, the second editing template, and the second PBS.

[1121] Embodiment 82: The prime editing composition of any one of Embodiments 1-81, wherein the first PEgRNA and/or the second PEgRNA further comprises 3′ mN*mN*mN*N and 5′mN*mN*mN*modifications, where m indicates that the nucleotide contains a 2′-O-Me modification and a * indicates the presence of a phosphorothioate bond.

[1122] Embodiment 83: The prime editing composition of any one of Embodiments 1-82, further comprising a prime editor or one or more polynucleotides encoding the prime editor, wherein the prime editor comprises a Cas9 nickase having a nuclease inactivating mutation in the HNH domain and a reverse transcriptase.

[1123] Embodiment 84: The prime editing composition of Embodiment 83, wherein the Cas9 nickase comprises an amino acid sequence having at least 80%, 85%, 90%, 95%, 96%, 97%, 98%, 99%, or 100% identity to SEQ ID NO: 3582.

[1124] Embodiment 85: The prime editing composition of Embodiment 83 or 84, wherein the reverse transcriptase comprises an amino acid sequence having at least 80%, 85%, 90%, 95%, 96%, 97%, 98%, 99%, or 100% identity to SEQ ID NO: 3579.

[1125] Embodiment 86: The prime editing system of Embodiment 84 or 85, wherein the sequence identities are determined by Needleman-Wunsch alignment of two protein sequences with Gap Costs set to Existence: 11 Extension: 1 where percent identity is calculated by dividing the number of identities by the length of the alignment.

[1126] Embodiment 87: The prime editing composition of any one of Embodiments 83-86, wherein the prime editor is a fusion protein.

[1127] Embodiment 88: The prime editing composition of any one of Embodiments 83-86, wherein the one or more polynucleotides comprise (a) a first sequence encoding an N-terminal portion of the Cas9 nickase and an intein-N and (b) a second sequence encoding a intein-C, a C-terminal portion of the Cas9 nickase, and the reverse transcriptase.

[1128] Embodiment 89: The prime editing composition of any one of Embodiments 83-88, comprising one or more vectors comprising the one or more polynucleotides encoding the first PEgRNA, the one or more polynucleotides encoding the second PEgRNA, and the one or more polynucleotides encoding the prime editor.

[1129] Embodiment 90: The prime editing composition of Embodiment 89, wherein the one or more vectors are AAV vectors.

[1130] Embodiment 91: An LNP comprising the prime editing composition of any one of Embodiments 1-90.

[1131] Embodiment 92: A method of editing a DMPK gene, the method comprising contacting the DMPK gene with (a) the prime editing composition of any one of Embodiments 1-82 and a prime editor comprising a Cas9 nickase having a nuclease inactivation mutation in the HNH domain and a reverse transcriptase, (b) the prime editing composition of any one of Embodiments 83-90, or (c) the LNP of Embodiment 91.

[1132] Embodiment 93: The method of Embodiment 92, wherein the DMPK gene is in a cell.

[1133] Embodiment 94: The method of Embodiment 93, wherein the cell is a mammalian cell.

[1134] Embodiment 95: The method of Embodiment 94, wherein the cell is a human cell.

[1135] Embodiment 96: The method of any one of Embodiments 93-95, wherein the cell is a fibroblast, a myoblast, a myosatellite, a muscle progenitor cell, a cardiomyocyte, a differentiated muscle cell, a skeletal muscle cell, or a smooth muscle cell.

[1136] Embodiment 97: The method of any one of Embodiments 93-96, wherein the cell is in a subject.

[1137] Embodiment 98: The method of Embodiment 87, wherein the subject is a human.

[1138] Embodiment 99: The method of any one of Embodiments 93-98, wherein the cell is from a subject having myotonic dystrophy type 1.

[1139] Embodiment 100: A cell generated by the method of any one of Embodiments 92-99.

[1140] Embodiment 101: A population of cells generated by the method of any one of Embodiments 92-99.

[1141] Embodiment 102: A method for treating myotonic dystrophy type 1 in a subject in need thereof, the method comprising administering to the subject (a) the prime editing composition of any one of Embodiments 1-82 and a prime editor comprising a Cas9 nickase having a nuclease inactivation mutation in the HNH domain and a reverse transcriptase, (b) the prime editing composition of any one of Embodiments 83-90, (c) the LNP of Embodiment 91, (d) the cell of Embodiment 00, or (e) the population of cells of Embodiment 101.

[1142] Embodiment 103: A composition comprising a first prime editing guide RNA (PEgRNA) and a second PEgRNA, wherein: the first PEgRNA comprises a first spacer that is complementary to a first search target sequence on a first strand of a double-stranded DMPK gene, a first gRNA core that associates with a first prime editor comprising a DNA binding domain and DNA polymerase domain, and a first editing template; and the second PEgRNA comprises a second spacer that is complementary to a second search target sequence on a second strand of the double-stranded DMPK gene, a second gRNA core that associates with a second prime editor comprising a DNA binding domain and a DNA polymerase domain, and a second editing template; wherein the first strand and the second strand of the double-stranded DMPK gene are complementary to each other, and wherein the first editing template and the second editing template each comprises a region of complementarity to each other.

[1143] Embodiment 104: A composition comprising a first prime editing guide RNA (PEgRNA) and a second PEgRNA, wherein: the first PEgRNA comprises a first spacer that is complementary to a first search target sequence on a first strand of a double-stranded DMPK gene, a first gRNA core that associates with a first prime editor comprising a DNA binding domain and DNA polymerase domain, and a first editing template; and the second PEgRNA comprises a second spacer that is complementary to a second search target sequence on a second strand of the double-stranded DMPK gene, a second gRNA core that associates with a second prime editor comprising a DNA binding domain and a DNA polymerase domain, and a second editing template; wherein the first strand and the second strand of the double-stranded DMPK gene are complementary to each other, wherein the first editing template comprises a region of identity to a sequence on the first strand of the DMPK gene, and wherein the second editing template comprises a region of identity to a sequence on the second strand of the double-stranded DMPK gene.

[1144] Embodiment 105: The composition of Embodiment 103 or 104, wherein the first PEgRNA directs the first prime editor to generate a first nick on the second strand of the DMPK gene, wherein the second PEgRNA directs the second prime editor to generate a second nick on the first strand of the DMPK gene, and wherein the DMPK gene comprises an inter-nick duplex (IND) between the position of the first nick and the position of the second nick.

[1145] Embodiment 106: The composition of Embodiment 105, wherein the IND comprises an array of tri-nucleotide repeats.

[1146] Embodiment 107: The composition of any one of the Embodiments 103-106, wherein the double-stranded DMPK gene comprises a mutation associated with myotonic dystrophy.

[1147] Embodiment 108: The composition of Embodiment 107, wherein the IND comprises the mutation associated with myotonic dystrophy.

[1148] Embodiment 109: The composition of Embodiment 108, wherein the mutation is an increased number of tri-nucleotide repeats in the array of tri-nucleotide repeats compared to a wild type DMPK gene.

[1149] Embodiment 110: The composition of any one of Embodiments 106-109, wherein the array of tri-nucleotide repeats comprises the sequence (CTG)n or a complementary sequence thereof, wherein n is any integer greater than 34.

[1150] Embodiment 111: The composition of Embodiment 110, wherein n is an integer greater than 50.

[1151] Embodiment 112: The composition of Embodiment 111, wherein n is an integer greater than 100.

[1152] Embodiment 113: The composition of any one of Embodiments 103 or 105-112, wherein the first editing template comprises an exogenous sequence compared to the DMPK gene.

[1153] Embodiment 114: The composition of any one of Embodiments 103 or 105-112, wherein the second editing template comprises an exogenous sequence compared to the DMPK gene.

[1154] Embodiment 115: The composition of Embodiment 113 or 114, wherein the region of complementarity between the first editing template and the second editing template comprises an exogenous sequence compared to the DMPK gene.

[1155] Embodiment 116: The composition of any one of Embodiments 113-115, wherein the exogenous sequence comprises a marker, an expression tag, a barcode, or a regulatory sequence.

[1156] Embodiment 117: The composition of any one of Embodiments 103 or 105-112, wherein the first editing template comprises a region of complementarity to the IND on the second strand of the DMPK gene.

[1157] Embodiment 118: The composition of any one of Embodiments 103 or 105-112, wherein the second editing template comprises a region of complementarity to the IND on the first strand of the DMPK gene.

[1158] Embodiment 119: The composition of Embodiment 117 or 118, wherein the sequence of the region of complementarity between the first editing template and the second editing template is at least partially identical to a sequence in the IND.

[1159] Embodiment 120: The composition of any one of Embodiments 117-119, wherein the first editing template comprises the sequence (CAG)n, wherein n is any integer between 0 and 33.

[1160] Embodiment 121: The composition of Embodiment 120, wherein n is any integer between 5 and 30.

[1161] Embodiment 122: The composition of Embodiment 120, wherein n is any integer between 10 and 25.

[1162] Embodiment 123: The composition of any one of Embodiments 117-119, wherein the second editing template comprises the sequence (CUG)m, wherein m is any integer between 0 and 33.

[1163] Embodiment 124: The composition of Embodiment 123, wherein m is any integer between 5 and 30.

[1164] Embodiment 125: The composition of Embodiment 123, wherein m is any integer between 10 and 25.

[1165] Embodiment 126: The composition of Embodiment 119, wherein the region of complementarity between the first editing template and the second editing template comprises the sequence (CAG)w, wherein w is any integer between 0 and 33.

[1166] Embodiment 127: The composition of Embodiment 126, wherein w is any integer between 5 and 30.

[1167] Embodiment 128: The composition of Embodiment 126, wherein w is any integer between 10 and 25.

[1168] Embodiment 129: The composition of any one of Embodiments 120-128, wherein (n+m−w) is an integer no greater than 33.

[1169] Embodiment 130: The composition of any one of the preceding Embodiments 103-129, wherein the IND further comprises a sequence upstream of the array of tri-nucleotide repeats, wherein upstream is determined by referring to the 5′ to 3′ orientation of the coding strand of the DMPK gene.

[1170] Embodiment 131: The composition of Embodiment 130, wherein the sequence upstream of the tri-nucleotide repeat sequence is at least 10 base pairs in length.

[1171] Embodiment 132: The composition of Embodiment 131, wherein the sequence upstream of the tri-nucleotide repeat sequence is 5 to 25 base pairs in length.

[1172] Embodiment 133: The composition of Embodiment 131, wherein the sequence upstream of the tri-nucleotide repeat sequence is 20 to 50 base pairs in length.

[1173] Embodiment 134: The composition of Embodiment 131, wherein the sequence upstream of the tri-nucleotide repeat sequence is 50 to 100 base pairs in length.

[1174] Embodiment 135: The composition of Embodiment 131, wherein the sequence upstream of the tri-nucleotide repeat sequence is 100, 200, 300, 400, or 500 base pairs in length.

[1175] Embodiment 136: The composition of any one of Embodiments 130-135, wherein the IND further comprises a sequence downstream of the array of tri-nucleotide repeats, wherein downstream is determined by referring to the 5′ to 3′ orientation of the coding strand of the DMPK gene.

[1176] Embodiment 137: The composition of Embodiment 136, wherein the sequence downstream of the tri-nucleotide repeat sequence is at least 10 base pairs in length.

[1177] Embodiment 138: The composition of Embodiment 136, wherein the sequence downstream of the tri-nucleotide repeat sequence is 5 to 25 base pairs in length.

[1178] Embodiment 139: The composition of Embodiment 136, wherein the sequence downstream of the tri-nucleotide repeat sequence is 20 to 50 base pairs in length.

[1179] Embodiment 140: The composition of Embodiment 136, wherein the sequence downstream of the tri-nucleotide repeat sequence is 50 to 100 base pairs in length.

[1180] Embodiment 141: The composition of Embodiment 136, wherein the sequence downstream of the tri-nucleotide repeat sequence is 100, 200, 300, 400, or 500 base pairs in length.

[1181] Embodiment 142: The composition of any one of Embodiments 117-141, wherein the first editing template further comprises a region of complementarity to a sequence on the second strand of the DMPK gene that is upstream of the array of tri-nucleotide repeats and/or a region of complementarity to a sequence on the second strand of the DMPK gene that is downstream of the array of tri-nucleotide repeats.

[1182] Embodiment 143: The composition of Embodiment 142, wherein the region of complementarity of the first editing template to the sequence upstream of the array of trinucleotide repeats or the region of complementarity of the first editing template to the sequence downstream of the array of tri-nucleotide repeats is 5 to 25 nucleotides in length.

[1183] Embodiment 144: The composition of Embodiment 142, wherein the region of complementarity of the first editing template to the sequence upstream of the array of trinucleotide repeats or the region of complementarity of the first editing template to the sequence downstream of the array of tri-nucleotide repeats is 10 to 15 nucleotides in length.

[1184] Embodiment 145: The composition of Embodiment 142, wherein the region of complementarity of the first editing template to the sequence upstream of the array of trinucleotide repeats or the region of complementarity of the first editing template to the sequence downstream of the array of tri-nucleotide repeats is 20 to 50 nucleotides in length.

[1185] Embodiment 146: The composition of Embodiment 142, wherein the region of complementarity of the first editing template to the sequence upstream of the array of trinucleotide repeats or the region of complementarity of the first editing template to the sequence downstream of the array of tri-nucleotide repeats is 50 to 100 nucleotides in length.

[1186] Embodiment 147: The composition of any one of Embodiments 142-146, wherein the first editing template comprises a sequence selected from the group consisting of SEQ ID NO.s 3557-3576.

[1187] Embodiment 148: The composition of any one of Embodiments 142-147, wherein the first editing template comprises a sequence selected from the group consisting of SEQ ID NO.s 3537-3556-.

[1188] Embodiment 149: The composition of any one of Embodiments 117-148, wherein the second editing template further comprises a region of complementarity to a sequence on the first strand of the DMPK gene that is upstream of the array of tri-nucleotide repeats and/or a region of complementarity to a sequence on the first strand of the DMPK gene that is downstream of the array of tri-nucleotide repeats.

[1189] Embodiment 150: The composition of Embodiment 149, wherein the region of complementarity of the second editing template to the sequence upstream of the array of trinucleotide repeats or the region of complementarity of the second editing template to the sequence downstream of the array of tri-nucleotide repeats is 5 to 25 nucleotides in length.

[1190] Embodiment 151: The composition of Embodiment 149, wherein the region of complementarity of the second editing template to the sequence upstream of the array of trinucleotide repeats or the region of complementarity of the second editing template to the sequence downstream of the array of tri-nucleotide repeats is 10 to 15 nucleotides in length.

[1191] Embodiment 152: The composition of Embodiment 149, wherein the region of complementarity of the second editing template to the sequence upstream of the array of trinucleotide repeats or the region of complementarity of the second editing template to the sequence downstream of the array of tri-nucleotide repeats is 20 to 50 nucleotides in length.

[1192] Embodiment 153: The composition of Embodiment 149, wherein the region of complementarity of the second editing template to the sequence upstream of the array of trinucleotide repeats or the region of complementarity of the second editing template to the sequence downstream of the array of tri-nucleotide repeats is 50 to 100 nucleotides in length.

[1193] Embodiment 154: The composition of any one of Embodiments 149-153, wherein the second editing template comprises a sequence selected from the group consisting of SEQ ID Nos 3517-3526 and 3527-3536.

[1194] Embodiment 155: The composition of any one of Embodiments 149-154, wherein the second editing template comprises a sequence selected from the group consisting of SEQ ID Nos 3497-3516.

[1195] Embodiment 156: The composition of Embodiment 104-112, wherein the first editing template and the second editing template are not complementary to each other.

[1196] Embodiment 157: The composition of Embodiment 104-112 or 156, wherein the first editing template and the second editing template comprise a region of complementarity to each other.

[1197] Embodiment 158: The composition of Embodiment 157, wherein the region of complementarity between the first editing template and the second editing template comprises an exogenous sequence compared to the double-stranded DMPK gene.

[1198] Embodiment 159: The composition of Embodiment 158, wherein the exogenous sequence comprises a marker, an expression tag, a barcode, or a regulatory sequence.

[1199] Embodiment 160: The composition of any one of Embodiments 156-159, wherein the first editing template comprises a region of identity or substantial identity to a sequence on the first strand of the double-stranded DMPK gene immediately adjacent to and outside the IND.

[1200] Embodiment 161: The composition of Embodiment 158, wherein the region of identity or substantial identity of the first editing template to the sequence on the first strand of the double-stranded DMPK gene immediately adjacent to and outside the IND is at least 10 nucleotides in length.

[1201] Embodiment 162: The composition of Embodiment 160, wherein the region of identity or substantial identity of the first editing template to the sequence on the first strand of the double-stranded DMPK gene immediately adjacent to and outside the IND is 15 to 100 nucleotides in length.

[1202] Embodiment 163: The composition of any one of Embodiments 160-162, wherein the second editing template comprises a region of identity or substantial identity to a sequence on the second strand of the DMPK gene immediately adjacent to and outside the IND.

[1203] Embodiment 164: The composition of Embodiment 163, wherein the region of identity or substantial identity of the second editing template to the sequence on the second strand of the double-stranded DMPK gene immediately adjacent to and outside the IND is at least 10 nucleotides in length.

[1204] Embodiment 165: The composition of Embodiment 163, wherein the region of identity or substantial identity of the second editing template to the sequence on the second strand of the double-stranded DMPK gene immediately adjacent to and outside the IND is 15 to 100 nucleotides in length.

[1205] Embodiment 166: The composition of any one of the preceding Embodiments, wherein the first PEgRNA comprises a first primer binding site (PBS) sequence that comprises a region of complementarity to the second strand of the double-stranded DMPK gene.

[1206] Embodiment 167: The composition of Embodiment 166, wherein the second PEgRNA comprises a second PBS sequence that comprises a region of complementarity to the first strand of the double-stranded DMPK gene.

[1207] Embodiment 168: The composition of Embodiment 166 or 167, wherein the first PEgRNA comprises a structure: 5′-[first spacer]-[first gRNA core]-[first editing template]-[first primer binding site sequence]-3′.

[1208] Embodiment 169: The composition of Embodiment 166 or 167, wherein the first PEgRNA comprises a structure: 5′-[first editing template]-[first primer binding site sequence]-[first spacer]-[first gRNA core]-3′.

[1209] Embodiment 170: The composition of any one of Embodiments 166-169, wherein the second PEgRNA comprises a structure: 5′-[second spacer sequence]-[second gRNA core]-[second editing template]-[second primer binding site]-3′.

[1210] Embodiment 171: The composition of any one of Embodiments 166-169, wherein the second PEgRNA comprises a structure: 5′-[second editing template]-[second primer binding site sequence]-[second spacer]-[second gRNA core]-3′.

[1211] Embodiment 172: The composition of any one of Embodiments 167-171, wherein the first PBS is at least partially complementary to the first spacer sequence.

[1212] Embodiment 173: The composition of any one of Embodiments 167-172, wherein the second PBS is at least partially complementary to the second spacer sequence.

[1213] Embodiment 174: The composition of any one of the preceding Embodiments, wherein the 5′ end of the first search target sequence is about 10, 50, 100, 200, 300, 400, 500, 1000, 1500, 2000, 2500, or 3000 nucleotides downstream of 3′ end of the CAG repeats.

[1214] Embodiment 175: The composition of Embodiment 174, wherein the 5′ end of the first search target sequence is at least 100 nucleotides downstream of 3′ end of the CAG repeats.

[1215] Embodiment 176: The composition of Embodiment 174, wherein the 5′ end of the first search target sequence is at least 50 nucleotides downstream of 3′ end of the CAG repeats.

[1216] Embodiment 177: The composition of any one of the preceding Embodiments 103-176, wherein the 5′ end of the second search target sequence is about 10, 50, 100, 200, 300, 400, 500, 1000, 1500, 2000, 2500, or 3000 nucleotides downstream of 3′ end of the CTG repeats.

[1217] Embodiment 178: The composition of Embodiment 177, wherein the 5′ end of the second search target sequence is at least 100 nucleotides downstream of 3′ end of the CTG repeats.

[1218] Embodiment 179: The composition of Embodiment 177, wherein the 5′ end of the second search target sequence is at least 50 nucleotides downstream of 3′ end of the CTG repeats.

[1219] Embodiment 180: The composition of any one of Embodiments 166-179, wherein the first PBS is about 2 to 20 nucleotides in length.

[1220] Embodiment 181: The composition of any one of Embodiments 166-180, wherein the second PBS is about 2 to 20 nucleotides in length.

[1221] Embodiment 182: The composition of Embodiment 181, wherein the first PBS is about 8 to 16 nucleotides in length.

[1222] Embodiment 183: The composition of Embodiment 181, wherein the second PBS is about 8 to 16 nucleotides in length.

[1223] Embodiment 184: The composition of Embodiment 181, wherein the first editing template is about 15-150 nucleotides in length.

[1224] Embodiment 185: The composition of Embodiment 181, wherein the first editing template is about 15-100 nucleotides in length.

[1225] Embodiment 186: The composition of Embodiment 181, wherein the first editing template is about 30-100 nucleotides in length.

[1226] Embodiment 187: The composition of Embodiment 181, wherein the first editing template is about 50-100 nucleotides in length.

[1227] Embodiment 188: The composition of Embodiment 181, wherein the first editing template is about 15-50 nucleotides in length.

[1228] Embodiment 189: The composition of Embodiment 181, wherein the second editing template is about 15-150 nucleotides in length.

[1229] Embodiment 190: The composition of Embodiment 181, wherein the second editing template is about 15-100 nucleotides in length.

[1230] Embodiment 191: The composition of Embodiment 181, wherein the second editing template is about 30-100 nucleotides in length.

[1231] Embodiment 192: The composition of Embodiment 181, wherein the second editing template is about 50-100 nucleotides in length.

[1232] Embodiment 193: The composition of Embodiment 181, wherein the second editing template is about 15-50 nucleotides in length.

[1233] Embodiment 194: The composition of any one of the preceding Embodiments 103-194, wherein the first editing template and second editing template are of the same length.

[1234] Embodiment 195: The composition of any one of Embodiments 103-193, wherein the first editing template and second editing template are of different lengths.

[1235] Embodiment 196: The composition of any one of the preceding Embodiments 103-196, wherein the first and/or the second spacer is about 15 to 25 nucleotides in length.

[1236] Embodiment 197: The composition of Embodiment 196, wherein the first and/or the second spacer is about 17 to 22 nucleotides in length.

[1237] Embodiment 198: The composition of Embodiment 196, wherein the first and/or the second spacer is about 20 to 22 nucleotides in length.

[1238] Embodiment 200: A dual prime editing system comprising the composition of any one of the preceding Embodiments and further comprising a first prime editor that comprises a DNA binding domain and a DNA polymerase domain and associates with the first PEgRNA, and a second prime editor that comprises a DNA binding domain and a DNA polymerase domain and associates with the second PEgRNA.

[1239] Embodiment 201: The dual prime editing system of Embodiment 200, wherein the first prime editor and the second prime editor are the same.

[1240] Embodiment 202: The dual prime editing system of Embodiment 201, wherein the DNA binding domain is a CRISPR associated (Cas) protein domain.

[1241] Embodiment 203: The dual prime editing system of Embodiment 202, wherein the Cas protein domain has a nickase activity.

[1242] Embodiment 204: The dual prime editing system of Embodiment 202, wherein the Cas protein domain is a Cas9.

[1243] Embodiment 205: The dual prime editing system of Embodiment 204, wherein the Cas9 comprises a mutation in an HNH domain.

[1244] Embodiment 206: The dual prime editing system of Embodiment 204, wherein the Cas9 comprises a H840A mutation in the HNH domain.

[1245] Embodiment 207: The dual prime editing system of Embodiment 202, wherein the Cas protein domain is a Cas12b.

[1246] Embodiment 208: The dual prime editing system of Embodiment 202, wherein the Cas protein domain is a Cas12a, Cas12b, Cas12c, Cas12d, Cas12e, Cas14a, Cas14b, Cas14c, Cas14d, Cas14e, Cas14f, Cas14g, Cas14h, Cas14u, or a Cas φ.

[1247] Embodiment 209: The dual prime editing system of any one of Embodiments 200-208, wherein the DNA polymerase domain is a reverse transcriptase.

[1248] Embodiment 210: The dual prime editing system of Embodiment 209, wherein the reverse transcriptase is a retrovirus reverse transcriptase.

[1249] Embodiment 211: The dual prime editing system of Embodiment 210, wherein the reverse transcriptase is a Moloney murine leukemia virus (M-MLV) reverse transcriptase.

[1250] Embodiment 212: The dual prime editing system of any one of Embodiments 200-211, wherein the DNA polymerase domain and the DNA binding domain are fused or linked to form a fusion protein, and wherein the DNA binding domain is a programmable DNA binding domain.

[1251] Embodiment 213: A lipid nanoparticle (LNP) or ribonucleoprotein (RNP) comprising the dual prime editing system of any one of Embodiments 200-212, or a component thereof.

[1252] Embodiment 214: A polynucleotide encoding the first PEgRNA and the second PEgRNA of any one of Embodiments 103-198, the dual prime editing system of any one of Embodiments 200-212, or a component thereof.

[1253] Embodiment 215: The polynucleotide of Embodiment 214, wherein the polynucleotide is a mRNA.

[1254] Embodiment 216: The polynucleotide of Embodiment 214 or 215, wherein the polynucleotide is operably linked to a regulatory element.

[1255] Embodiment 217: The polynucleotide of Embodiment 216, wherein the regulatory element is an inducible regulatory element.

[1256] Embodiment 218: A vector comprising the polynucleotide of any one of Embodiments 214-217.

[1257] Embodiment 219: The vector of Embodiment 218, wherein the vector is an AAV vector.

[1258] Embodiment 220: An isolated cell comprising the first PEgRNA and second PEgRNA of any one of Embodiments 103-198, the dual prime editing system of any one of Embodiments 200-212, the LNP or RNP of Embodiment 213, the polynucleotide of any one of Embodiments 214-217, or the vector of Embodiments 218 or 219.

[1259] Embodiment 221: The cell of Embodiment 220, wherein the cell is a human cell.

[1260] Embodiment 222: The cell of Embodiment 220 or 221, wherein the cell is a fibroblast, a myoblast, a myosatellite, a muscle progenitor cell, a skeletal muscle cell, a smooth muscle cell, or a differentiated muscle cell.

[1261] Embodiment 223: A pharmaceutical composition comprising (i) the composition of any one of Embodiments 103-198, the dual prime editing system of any one of Embodiments 200-212, the LNP or RNP of Embodiment 213, the polynucleotide of any one of Embodiments 214-217, or the vector of Embodiments 218 or 219, or the cell of any one of Embodiments 220-222; and (ii) a pharmaceutically acceptable carrier.

[1262] Embodiment 224: A method for editing a DMPK gene, the method comprising contacting the DMPK gene with (i) the composition of any one of Embodiments 103-198, (ii) a first prime editor comprising a DNA binding domain and a DNA polymerase domain that associates with the first PEgRNA, and (iii) a second prime editor comprising a DNA binding domain and a DNA polymerase domain that associates with the second PEgRNA, wherein the first PEgRNA directs the first prime editor to generate a first nick on the second strand of the DMPK gene, wherein the second PEgRNA directs the second prime editor to generate a second nick on the first strand of the DMPK gene, and wherein the contacting results in excision of an inter-nick duplex (IND) between the position of the first nick and the position of the second nick of the DMPK gene, thereby editing the DMPK gene.

[1263] Embodiment 225: A method for editing a DMPK gene, the method comprising contacting the DMPK gene with the dual prime editing system of any one of Embodiments 200-211, wherein the first PEgRNA directs the first prime editor to generate a first nick on the second strand of the DMPK gene, wherein the second PEgRNA directs the second prime editor to generate a second nick on the first strand of the DMPK gene, and wherein the contacting results in excision of an inter-nick duplex (IND) between the position of the first nick and the position of the second nick of the DMPK gene, thereby editing the DMPK gene.

[1264] Embodiment 226: The method of Embodiment 224 or 225, wherein the first prime editor and the second prime editor are the same.

[1265] Embodiment 227: The method of any one of Embodiments 224-226, wherein the first editing template encodes a first single stranded DNA, and wherein the first single stranded DNA is incorporated in the DMPK gene.

[1266] Embodiment 228: The method of any one of Embodiments 224-227, wherein the second editing template encodes a second single stranded DNA, and wherein the second single stranded DNA is incorporated in the DMPK gene.

[1267] Embodiment 229: The method of any one of Embodiments 224-228, wherein the contacting results in deletion of the array of tri-nucleotide repeats in the DMPK gene.

[1268] Embodiment 230: The method of any one of Embodiments 224-228, wherein the contacting results in a reduced number of tri-nucleotide repeats in the DMPK gene.

[1269] Embodiment 231: The method of any one of Embodiments 224-230, wherein the contacting results in deletion of the sequence (CTG)x in the DMPK gene, wherein x is an integer no less than 1.

[1270] Embodiment 232: The method of Embodiment 231, wherein x is an integer between 5 and 30.

[1271] Embodiment 233: The method of Embodiment 231, wherein x is an integer greater than 50.

[1272] Embodiment 234: The method of Embodiment 231, wherein x is an integer greater than 100.

[1273] Embodiment 235: The method of Embodiment 231, wherein x is an integer greater than 1000.

[1274] Embodiment 236: The method of any one of Embodiments 224-235, wherein the contacting results in no greater than 33 CTG repeats in a 3′ untranslated region (3′ UTR) of the DMPK gene.

[1275] Embodiment 237: The method of Embodiment 236, wherein the contacting results in no CTG repeats in a 3′ untranslated region (3′ UTR) of the DMPK gene.

[1276] Embodiment 238: The method of any one of Embodiments 224-237, wherein the DMPK gene is in a cell.

[1277] Embodiment 239: The method of Embodiment 238, wherein the cell is a mammalian cell, human cell, primary cell, or muscle cell.

[1278] Embodiment 240: The method of Embodiment 238 or 239, wherein the cell is a fibroblast, a myoblast, a myosatellite, a muscle progenitor cell, a skeletal muscle cell, a smooth muscle cell, or a differentiated muscle cell.

[1279] Embodiment 241: The method of any one of Embodiments 238-240, wherein the cell is in a subject.

[1280] Embodiment 242: The method of Embodiment 241, wherein the subject is a human.

[1281] Embodiment 243: The method of any one of Embodiments 238-242, wherein the cell is from a subject having Myotonic dystrophy.

[1282] Embodiment 244: The method of Embodiment 243, further comprising administering the cell to the subject after the contacting.

[1283] Embodiment 245: A method for treating myotonic dystrophy in a subject in need thereof, the method comprising administering to the subject the composition of any one of Embodiments 103-198, the dual prime editing system of any one of Embodiments 200-212, the LNP or RNP of Embodiment 213, the polynucleotide of any one of Embodiments 214-217, the vector of Embodiments 218 or 219, or the cell of any one of Embodiments 220-222, or the pharmaceutical composition of Embodiment 223, wherein the administration results in a reduced number of an array of CTG repeats in the DMPK gene in the subject, thereby treating myotonic dystrophy in the subject.

[1284] Embodiment 246: The method of Embodiment 231, wherein the subject is a human.

### EXAMPLES

[1285] The following examples are provided for illustrative purposes only and are not intended to limit the scope of the claims provided herein. For Examples 2-8, the indicated PEgRNA sequence does not contain the adaptations for transcription from a DNA template used experimentally (i.e., addition of a 5′G if the spacer did not already start with a G and addition of 1-6 3′U from the U6 transcription termination sequence).

### Example 1. General Methods

[1286] PEgRNA assembly: PEgRNA libraries are assembled by one of three methods: in the first method, pooled synthesized DNA oligos encoding the PEgRNA and flanking U6 expression plasmid homology regions are cloned into U6 expression plasmids via Gibson cloning and sequencing of bacterial colonies via Sanger or Next-generation sequencing. In the second method, double-stranded linear DNA fragments encoding PEgRNA and homology sequences as above are individually Gibson-cloned into U6 expression plasmids. In the third method, for each PEgRNA, separate oligos encoding a protospacer, a gRNA scaffold, and PEgRNA extension (PBS and RTT) are ligated, and then cloned into a U6 expression plasmid as described in Anzalone et al., Nature. 2019 December; 576(7785):149-157. Bacterial colonies carrying sequence-verified plasmids are propagated in TB. Plasmid DNA is purified by minipreps for mammalian transfection.

[1287] HEK cell culture and transfection: HEK293T cells are propagated in DMEM with 10% FBS. Prior to transfection, cells are seeded in 96-well plates and then transfected with Lipofectamine 2000 according to the manufacturer's directions with polynucleotide encoding a prime editor fusion protein and a pair of PEgRNAs. Three days after transfection, gDNA is harvested in lysis buffer for high throughput sequencing and is sequenced using Miseq.

[1288] iPSC transfection and editing analysis. iPSC cells are plated in 96-well plate on Matrigel-coated plates in E8 media with 10 μM of ROCK inhibitor. Cells are transfected on the following day with Lipofectamine STEM according to the manufacturer's directions with polynucleotides encoding a pair of PEgRNAs and a prime editor fusion protein. Three days after transfection, gDNA is harvested in lysis buffer for sequencing and analysis with droplet digital PCR (ddPCR).

### Example 2. Screening of PEgRNA for Excising CTG Repeats Associated with Myotonic Dystrophy Type I

[1289] A PEgRNA library was designed to replace the CTG repeats in the DMPK gene with an exogenous 38 nt attB sequence. Three days after transfection, gDNA was harvested in lysis buffer for high throughput sequencing and sequenced using MiSeq.

[1290] Wild type HEK 293T cells were transfected with polynucleotides encoding a prime editor fusion protein a pair of PEgRNAs as described in Example 1. Editing efficiency of dual prime editing is reflected by excision of the 5 CTG repeats in wildtype HEK293T cells and integration of the attB sequence encoded by the RTTs of the PEgRNA pair.

[1291] An editing DMPK sequence is expected to contains a 38 nt attB sequence that replaces the CTG repeats. A 72 nt sequence, which contains the 38 nt attB sequence flanked by 17 bp of endogenous, non-CTG repeat DMPK sequence on each side, was used as a marker sequence for attB integration at the position of CTG repeat excision to assess dual prime editing efficiency. Sequencing read numbers, including (a) total editing reads, (b) reads of sequences that have exact match to the 72 bp sequence including the attB sequence and the flanking sequences on both sides, and (c) reads of sequences that have match to the 38 bp attB sequence (but not necessarily match to the 72 bp sequence) were calculated. Editing and indel frequency was quantified using the following formula: editing %=(b)/(a), and indel %=(c)/(a).

[1292] The results are shown in Table 51 below. In Table 51, each row presents information for a pair of PEgRNAs (i.e. a 5′ PEgRNA and a 3′ PEgRNA) used in dual prime editing. Each PEgRNA is identified by a sequence identifier (“SEQ ID NO”), and information is also presented for the spacer number and PBS length of each PEgRNA that was tested. The following scale was used for editing efficiency: PEgRNA pairs exhibiting editing efficiency between 0% to 1% are indicated with “+”, PEgRNA pairs exhibiting editing efficiency of 1% to 10% are indicated with “++”, and PEgRNA pairs exhibiting editing efficiency of 10% to 100% are indicated with “+++”.

TABLE 51
Dual prime editing pegRNA screen for CTG excision in HEK 293T cells.

| | 5′ PEgRNA | | | 3′ PEgRNA | 3′ PBS | | |
|---|---|---|---|---|---|---|---|
| 5′ spacer No. | SEQ ID | 5′ PBS length | 3′ spacer | SEQ ID | length | % Indel | % Editing |
| 5′ spacer 1 | 18 | 11 | 3′ spacer 1 | 1376 | 10 | + | − |
| 5′ spacer 1 | 17 | 8 | 3′ spacer 1 | 1376 | 10 | + | − |
| 5′ spacer 1 | 19 | 13 | 3′ spacer 1 | 1376 | 10 | + | + |
| 5′ spacer 1 | 17 | 8 | 3′ spacer 1 | 1375 | 8 | + | − |
| 5′ spacer 1 | 17 | 8 | 3′ spacer 1 | 1377 | 12 | + | − |
| 5′ spacer 1 | 18 | 11 | 3′ spacer 1 | 1375 | 8 | + | + |
| 5′ spacer 1 | 18 | 11 | 3′ spacer 1 | 1377 | 12 | + | + |
| 5′ spacer 1 | 19 | 13 | 3′ spacer 1 | 1375 | 8 | + | + |
| 5′ spacer 1 | 19 | 13 | 3′ spacer 1 | 1377 | 12 | + | − |
| 5′ spacer 1 | 17 | 8 | 3′ spacer 2 | 1397 | 8 | + | − |
| 5′ spacer 1 | 17 | 8 | 3′ spacer 2 | 1398 | 10 | + | + |
| 5′ spacer 1 | 17 | 8 | 3′ spacer 2 | 1399 | 12 | + | − |
| 5′ spacer 1 | 18 | 11 | 3′ spacer 2 | 1397 | 8 | + | + |
| 5′ spacer 1 | 19 | 13 | 3′ spacer 2 | 1399 | 12 | + | + |
| 5′ spacer 1 | 19 | 13 | 3′ spacer 2 | 1397 | 8 | + | − |
| 5′ spacer 1 | 19 | 13 | 3′ spacer 2 | 1398 | 10 | + | + |
| 5′ spacer 1 | 18 | 11 | 3′ spacer 2 | 1399 | 12 | + | + |
| 5′ spacer 1 | 18 | 11 | 3′ spacer 2 | 1398 | 10 | + | + |
| 5′ spacer 1 | 18 | 11 | 3′ spacer 3 | 1420 | 10 | +++ | − |
| 5′ spacer 1 | 17 | 8 | 3′ spacer 3 | 1419 | 8 | +++ | − |
| 5′ spacer 1 | 19 | 13 | 3′ spacer 3 | 1419 | 8 | +++ | − |
| 5′ spacer 1 | 17 | 8 | 3′ spacer 3 | 1421 | 14 | +++ | − |
| 5′ spacer 1 | 19 | 13 | 3′ spacer 3 | 1420 | 10 | +++ | + |
| 5′ spacer 1 | 19 | 13 | 3′ spacer 3 | 1421 | 14 | +++ | + |
| 5′ spacer 1 | 18 | 11 | 3′ spacer 3 | 1419 | 8 | +++ | − |
| 5′ spacer 1 | 18 | 11 | 3′ spacer 3 | 1421 | 14 | +++ | + |
| 5′ spacer 1 | 17 | 8 | 3′ spacer 3 | 1420 | 10 | +++ | − |
| 5′ spacer 1 | 17 | 8 | 3′ spacer 4 | 1521 | 12 | ++ | + |
| 5′ spacer 1 | 18 | 11 | 3′ spacer 4 | 1519 | 8 | + | − |
| 5′ spacer 1 | 18 | 11 | 3′ spacer 4 | 1521 | 12 | + | − |
| 5′ spacer 1 | 19 | 13 | 3′ spacer 4 | 1520 | 10 | ++ | − |
| 5′ spacer 1 | 19 | 13 | 3′ spacer 4 | 1519 | 8 | + | − |
| 5′ spacer 1 | 18 | 11 | 3′ spacer 4 | 1520 | 10 | +++ | − |
| 5′ spacer 1 | 17 | 8 | 3′ spacer 4 | 1520 | 10 | +++ | − |
| 5′ spacer 1 | 17 | 8 | 3′ spacer 4 | 1519 | 8 | + | − |
| 5′ spacer 1 | 19 | 13 | 3′ spacer 4 | 1521 | 12 | + | − |
| 5′ spacer 1 | 19 | 13 | 3′ spacer 5 | 1543 | 12 | + | + |
| 5′ spacer 1 | 17 | 8 | 3′ spacer 5 | 1543 | 12 | + | − |
| 5′ spacer 1 | 18 | 11 | 3′ spacer 5 | 1541 | 8 | + | + |
| 5′ spacer 1 | 17 | 8 | 3′ spacer 5 | 1541 | 8 | ++ | − |
| 5′ spacer 1 | 19 | 13 | 3′ spacer 5 | 1541 | 8 | + | + |
| 5′ spacer 1 | 18 | 11 | 3′ spacer 5 | 1543 | 12 | + | + |
| 5′ spacer 1 | 19 | 13 | 3′ spacer 5 | 1542 | 10 | + | + |
| 5′ spacer 1 | 18 | 11 | 3′ spacer 5 | 1542 | 10 | + | + |
| 5′ spacer 1 | 17 | 8 | 3′ spacer 5 | 1542 | 10 | + | + |
| 5′ spacer 3 | 57 | 12 | 3′ spacer 1 | 1375 | 8 | + | + |
| 5′ spacer 3 | 57 | 12 | 3′ spacer 1 | 1377 | 12 | + | + |
| 5′ spacer 3 | 55 | 8 | 3′ spacer 1 | 1377 | 12 | + | + |
| 5′ spacer 3 | 56 | 10 | 3′ spacer 1 | 1377 | 12 | + | + |
| 5′ spacer 3 | 55 | 8 | 3′ spacer 1 | 1375 | 8 | + | + |
| 5′ spacer 3 | 56 | 10 | 3′ spacer 1 | 1376 | 10 | + | + |
| 5′ spacer 3 | 57 | 12 | 3′ spacer 1 | 1376 | 10 | + | + |
| 5′ spacer 3 | 56 | 10 | 3′ spacer 1 | 1375 | 8 | + | + |
| 5′ spacer 3 | 55 | 8 | 3′ spacer 1 | 1376 | 10 | + | + |
| 5′ spacer 3 | 56 | 10 | 3′ spacer 2 | 1398 | 10 | + | + |
| 5′ spacer 3 | 56 | 10 | 3′ spacer 2 | 1397 | 8 | + | + |
| 5′ spacer 3 | 56 | 10 | 3′ spacer 2 | 1399 | 12 | + | + |
| 5′ spacer 3 | 55 | 8 | 3′ spacer 2 | 1399 | 12 | + | + |
| 5′ spacer 3 | 57 | 12 | 3′ spacer 2 | 1399 | 12 | + | + |
| 5′ spacer 3 | 57 | 12 | 3′ spacer 2 | 1398 | 10 | + | + |
| 5′ spacer 3 | 57 | 12 | 3′ spacer 2 | 1397 | 8 | + | + |
| 5′ spacer 3 | 55 | 8 | 3′ spacer 2 | 1398 | 10 | + | + |
| 5′ spacer 3 | 55 | 8 | 3′ spacer 2 | 1397 | 8 | + | + |
| 5′ spacer 3 | 55 | 8 | 3′ spacer 3 | 1419 | 8 | +++ | + |
| 5′ spacer 3 | 55 | 8 | 3′ spacer 3 | 1421 | 14 | +++ | + |
| 5′ spacer 3 | 57 | 12 | 3′ spacer 3 | 1420 | 10 | +++ | + |
| 5′ spacer 3 | 56 | 10 | 3′ spacer 3 | 1421 | 14 | +++ | + |
| 5′ spacer 3 | 57 | 12 | 3′ spacer 3 | 1419 | 8 | +++ | + |
| 5′ spacer 3 | 55 | 8 | 3′ spacer 3 | 1420 | 10 | ++ | + |
| 5′ spacer 3 | 57 | 12 | 3′ spacer 3 | 1421 | 14 | +++ | + |
| 5′ spacer 3 | 56 | 10 | 3′ spacer 3 | 1419 | 8 | +++ | + |
| 5′ spacer 3 | 56 | 10 | 3′ spacer 3 | 1420 | 10 | +++ | + |
| 5′ spacer 3 | 56 | 10 | 3′ spacer 4 | 1521 | 12 | + | + |
| 5′ spacer 3 | 57 | 12 | 3′ spacer 4 | 1520 | 10 | +++ | + |
| 5′ spacer 3 | 55 | 8 | 3′ spacer 4 | 1519 | 8 | + | + |
| 5′ spacer 3 | 55 | 8 | 3′ spacer 4 | 1520 | 10 | +++ | + |
| 5′ spacer 3 | 57 | 12 | 3′ spacer 4 | 1521 | 12 | + | + |
| 5′ spacer 3 | 56 | 10 | 3′ spacer 4 | 1520 | 10 | +++ | + |
| 5′ spacer 3 | 55 | 8 | 3′ spacer 4 | 1521 | 12 | + | + |
| 5′ spacer 3 | 57 | 12 | 3′ spacer 4 | 1519 | 8 | + | − |
| 5′ spacer 3 | 56 | 10 | 3′ spacer 4 | 1519 | 8 | + | − |
| 5′ spacer 3 | 56 | 10 | 3′ spacer 5 | 1542 | 10 | + | + |
| 5′ spacer 3 | 56 | 10 | 3′ spacer 5 | 1543 | 12 | + | + |
| 5′ spacer 3 | 55 | 8 | 3′ spacer 5 | 1542 | 10 | + | + |
| 5′ spacer 3 | 55 | 8 | 3′ spacer 5 | 1543 | 12 | + | + |
| 5′ spacer 3 | 57 | 12 | 3′ spacer 5 | 1541 | 8 | + | + |
| 5′ spacer 3 | 56 | 10 | 3′ spacer 5 | 1541 | 8 | + | + |
| 5′ spacer 3 | 57 | 12 | 3′ spacer 5 | 1542 | 10 | + | + |
| 5′ spacer 3 | 57 | 12 | 3′ spacer 5 | 1543 | 12 | + | + |
| 5′ spacer 3 | 55 | 8 | 3′ spacer 5 | 1541 | 8 | + | + |
| 5′ spacer 4 | 74 | 8 | 3′ spacer 1 | 1376 | 10 | + | ++ |
| 5′ spacer 4 | 75 | 10 | 3′ spacer 1 | 1377 | 12 | + | + |
| 5′ spacer 4 | 75 | 10 | 3′ spacer 1 | 1375 | 8 | +++ | + |
| 5′ spacer 4 | 76 | 12 | 3′ spacer 1 | 1377 | 12 | + | ++ |
| 5′ spacer 4 | 75 | 10 | 3′ spacer 1 | 1376 | 10 | + | + |
| 5′ spacer 4 | 74 | 8 | 3′ spacer 1 | 1375 | 8 | ++ | + |
| 5′ spacer 4 | 74 | 8 | 3′ spacer 1 | 1377 | 12 | + | ++ |
| 5′ spacer 4 | 76 | 12 | 3′ spacer 1 | 1375 | 8 | ++ | + |
| 5′ spacer 4 | 76 | 12 | 3′ spacer 1 | 1376 | 10 | + | ++ |
| 5′ spacer 4 | 76 | 12 | 3′ spacer 2 | 1397 | 8 | + | ++ |
| 5′ spacer 4 | 75 | 10 | 3′ spacer 2 | 1399 | 12 | + | ++ |
| 5′ spacer 4 | 76 | 12 | 3′ spacer 2 | 1398 | 10 | + | ++ |
| 5′ spacer 4 | 75 | 10 | 3′ spacer 2 | 1397 | 8 | + | ++ |
| 5′ spacer 4 | 76 | 12 | 3′ spacer 2 | 1399 | 12 | + | ++ |
| 5′ spacer 4 | 74 | 8 | 3′ spacer 2 | 1397 | 8 | + | ++ |
| 5′ spacer 4 | 74 | 8 | 3′ spacer 2 | 1399 | 12 | + | ++ |
| 5′ spacer 4 | 75 | 10 | 3′ spacer 2 | 1398 | 10 | + | ++ |
| 5′ spacer 4 | 74 | 8 | 3′ spacer 2 | 1398 | 10 | + | ++ |
| 5′ spacer 4 | 76 | 12 | 3′ spacer 3 | 1420 | 10 | ++ | +++ |
| 5′ spacer 4 | 75 | 10 | 3′ spacer 3 | 1419 | 8 | ++ | ++ |
| 5′ spacer 4 | 76 | 12 | 3′ spacer 3 | 1419 | 8 | ++ | ++ |
| 5′ spacer 4 | 74 | 8 | 3′ spacer 3 | 1420 | 10 | ++ | ++ |
| 5′ spacer 4 | 76 | 12 | 3′ spacer 3 | 1421 | 14 | ++ | ++ |
| 5′ spacer 4 | 74 | 8 | 3′ spacer 3 | 1421 | 14 | +++ | ++ |
| 5′ spacer 4 | 74 | 8 | 3′ spacer 3 | 1419 | 8 | ++ | ++ |
| 5′ spacer 4 | 75 | 10 | 3′ spacer 3 | 1421 | 14 | +++ | ++ |
| 5′ spacer 4 | 75 | 10 | 3′ spacer 3 | 1420 | 10 | +++ | ++ |
| 5′ spacer 4 | 74 | 8 | 3′ spacer 4 | 1519 | 8 | + | + |
| 5′ spacer 4 | 75 | 10 | 3′ spacer 4 | 1520 | 10 | +++ | + |
| 5′ spacer 4 | 75 | 10 | 3′ spacer 4 | 1519 | 8 | + | + |
| 5′ spacer 4 | 75 | 10 | 3′ spacer 4 | 1521 | 12 | ++ | ++ |
| 5′ spacer 4 | 74 | 8 | 3′ spacer 4 | 1521 | 12 | ++ | ++ |
| 5′ spacer 4 | 76 | 12 | 3′ spacer 4 | 1520 | 10 | ++ | + |
| 5′ spacer 4 | 76 | 12 | 3′ spacer 4 | 1521 | 12 | + | ++ |
| 5′ spacer 4 | 74 | 8 | 3′ spacer 4 | 1520 | 10 | ++ | + |
| 5′ spacer 4 | 76 | 12 | 3′ spacer 4 | 1519 | 8 | + | + |
| 5′ spacer 4 | 76 | 12 | 3′ spacer 5 | 1542 | 10 | ++ | +++ |
| 5′ spacer 4 | 76 | 12 | 3′ spacer 5 | 1543 | 12 | +++ | +++ |
| 5′ spacer 4 | 75 | 10 | 3′ spacer 5 | 1543 | 12 | +++ | +++ |
| 5′ spacer 4 | 74 | 8 | 3′ spacer 5 | 1542 | 10 | +++ | +++ |
| 5′ spacer 4 | 76 | 12 | 3′ spacer 5 | 1541 | 8 | +++ | +++ |
| 5′ spacer 4 | 74 | 8 | 3′ spacer 5 | 1541 | 8 | +++ | +++ |
| 5′ spacer 4 | 75 | 10 | 3′ spacer 5 | 1542 | 10 | +++ | +++ |
| 5′ spacer 4 | 74 | 8 | 3′ spacer 5 | 1543 | 12 | +++ | +++ |
| 5′ spacer 4 | 75 | 10 | 3′ spacer 5 | 1541 | 8 | +++ | +++ |
| 5′ spacer 5 | 94 | 10 | 3′ spacer 1 | 1377 | 12 | ++ | ++ |
| 5′ spacer 5 | 93 | 8 | 3′ spacer 1 | 1375 | 8 | +++ | ++ |
| 5′ spacer 5 | 95 | 13 | 3′ spacer 1 | 1375 | 8 | +++ | + |
| 5′ spacer 5 | 95 | 13 | 3′ spacer 1 | 1377 | 12 | ++ | ++ |
| 5′ spacer 5 | 94 | 10 | 3′ spacer 1 | 1376 | 10 | ++ | ++ |
| 5′ spacer 5 | 93 | 8 | 3′ spacer 1 | 1377 | 12 | ++ | ++ |
| 5′ spacer 5 | 94 | 10 | 3′ spacer 1 | 1375 | 8 | +++ | ++ |
| 5′ spacer 5 | 95 | 13 | 3′ spacer 1 | 1376 | 10 | ++ | ++ |
| 5′ spacer 5 | 93 | 8 | 3′ spacer 1 | 1376 | 10 | ++ | +++ |
| 5′ spacer 5 | 93 | 8 | 3′ spacer 2 | 1399 | 12 | ++ | +++ |
| 5′ spacer 5 | 95 | 13 | 3′ spacer 2 | 1397 | 8 | ++ | ++ |
| 5′ spacer 5 | 93 | 8 | 3′ spacer 2 | 1397 | 8 | ++ | +++ |
| 5′ spacer 5 | 94 | 10 | 3′ spacer 2 | 1397 | 8 | ++ | +++ |
| 5′ spacer 5 | 93 | 8 | 3′ spacer 2 | 1398 | 10 | ++ | +++ |
| 5′ spacer 5 | 95 | 13 | 3′ spacer 2 | 1398 | 10 | +++ | +++ |
| 5′ spacer 5 | 94 | 10 | 3′ spacer 2 | 1399 | 12 | ++ | +++ |
| 5′ spacer 5 | 95 | 13 | 3′ spacer 2 | 1399 | 12 | ++ | +++ |
| 5′ spacer 5 | 94 | 10 | 3′ spacer 2 | 1398 | 10 | ++ | +++ |
| 5′ spacer 5 | 94 | 10 | 3′ spacer 3 | 1419 | 8 | ++ | ++ |
| 5′ spacer 5 | 93 | 8 | 3′ spacer 3 | 1420 | 10 | +++ | +++ |
| 5′ spacer 5 | 95 | 13 | 3′ spacer 3 | 1419 | 8 | ++ | ++ |
| 5′ spacer 5 | 95 | 13 | 3′ spacer 3 | 1421 | 14 | +++ | +++ |
| 5′ spacer 5 | 93 | 8 | 3′ spacer 3 | 1419 | 8 | ++ | ++ |
| 5′ spacer 5 | 94 | 10 | 3′ spacer 3 | 1421 | 14 | +++ | +++ |
| 5′ spacer 5 | 93 | 8 | 3′ spacer 3 | 1421 | 14 | +++ | +++ |
| 5′ spacer 5 | 94 | 10 | 3′ spacer 3 | 1420 | 10 | +++ | +++ |
| 5′ spacer 5 | 95 | 13 | 3′ spacer 3 | 1420 | 10 | +++ | +++ |
| 5′ spacer 5 | 94 | 10 | 3′ spacer 4 | 1519 | 8 | + | + |
| 5′ spacer 5 | 93 | 8 | 3′ spacer 4 | 1521 | 12 | + | ++ |
| 5′ spacer 5 | 94 | 10 | 3′ spacer 4 | 1520 | 10 | ++ | ++ |
| 5′ spacer 5 | 93 | 8 | 3′ spacer 4 | 1519 | 8 | + | + |
| 5′ spacer 5 | 93 | 8 | 3′ spacer 4 | 1520 | 10 | +++ | ++ |
| 5′ spacer 5 | 95 | 13 | 3′ spacer 4 | 1520 | 10 | ++ | ++ |
| 5′ spacer 5 | 95 | 13 | 3′ spacer 4 | 1521 | 12 | ++ | ++ |
| 5′ spacer 5 | 95 | 13 | 3′ spacer 4 | 1519 | 8 | ++ | + |
| 5′ spacer 5 | 94 | 10 | 3′ spacer 4 | 1521 | 12 | ++ | ++ |
| 5′ spacer 5 | 95 | 13 | 3′ spacer 5 | 1542 | 10 | ++ | +++ |
| 5′ spacer 5 | 93 | 8 | 3′ spacer 5 | 1541 | 8 | ++ | +++ |
| 5′ spacer 5 | 94 | 10 | 3′ spacer 5 | 1542 | 10 | ++ | +++ |
| 5′ spacer 5 | 95 | 13 | 3′ spacer 5 | 1541 | 8 | ++ | +++ |
| 5′ spacer 5 | 94 | 10 | 3′ spacer 5 | 1543 | 12 | ++ | +++ |
| 5′ spacer 5 | 95 | 13 | 3′ spacer 5 | 1543 | 12 | ++ | +++ |
| 5′ spacer 5 | 93 | 8 | 3′ spacer 5 | 1542 | 10 | ++ | +++ |
| 5′ spacer 5 | 93 | 8 | 3′ spacer 5 | 1543 | 12 | ++ | +++ |
| 5′ spacer 5 | 94 | 10 | 3′ spacer 5 | 1541 | 8 | ++ | +++ |
| 5′ spacer 6 | 500 | 8 | 3′ spacer 1 | 1377 | 12 | + | ++ |
| 5′ spacer 6 | 502 | 12 | 3′ spacer 1 | 1375 | 8 | +++ | + |
| 5′ spacer 6 | 502 | 12 | 3′ spacer 1 | 1376 | 10 | ++ | ++ |
| 5′ spacer 6 | 501 | 10 | 3′ spacer 1 | 1376 | 10 | ++ | ++ |
| 5′ spacer 6 | 500 | 8 | 3′ spacer 1 | 1375 | 8 | +++ | + |
| 5′ spacer 6 | 500 | 8 | 3′ spacer 1 | 1376 | 10 | + | ++ |
| 5′ spacer 6 | 501 | 10 | 3′ spacer 1 | 1377 | 12 | ++ | ++ |
| 5′ spacer 6 | 502 | 12 | 3′ spacer 1 | 1377 | 12 | +++ | + |
| 5′ spacer 6 | 501 | 10 | 3′ spacer 1 | 1375 | 8 | +++ | ++ |
| 5′ spacer 6 | 501 | 10 | 3′ spacer 2 | 1397 | 8 | + | +++ |
| 5′ spacer 6 | 502 | 12 | 3′ spacer 2 | 1397 | 8 | + | + |
| 5′ spacer 6 | 500 | 8 | 3′ spacer 2 | 1399 | 12 | + | +++ |
| 5′ spacer 6 | 502 | 12 | 3′ spacer 2 | 1399 | 12 | + | +++ |
| 5′ spacer 6 | 502 | 12 | 3′ spacer 2 | 1398 | 10 | + | +++ |
| 5′ spacer 6 | 500 | 8 | 3′ spacer 2 | 1397 | 8 | + | ++ |
| 5′ spacer 6 | 501 | 10 | 3′ spacer 2 | 1398 | 10 | + | +++ |
| 5′ spacer 6 | 500 | 8 | 3′ spacer 2 | 1398 | 10 | + | +++ |
| 5′ spacer 6 | 501 | 10 | 3′ spacer 2 | 1399 | 12 | + | +++ |
| 5′ spacer 6 | 500 | 8 | 3′ spacer 3 | 1421 | 14 | +++ | +++ |
| 5′ spacer 6 | 501 | 10 | 3′ spacer 3 | 1421 | 14 | +++ | +++ |
| 5′ spacer 6 | 502 | 12 | 3′ spacer 3 | 1421 | 14 | +++ | +++ |
| 5′ spacer 6 | 501 | 10 | 3′ spacer 3 | 1419 | 8 | +++ | ++ |
| 5′ spacer 6 | 500 | 8 | 3′ spacer 3 | 1419 | 8 | ++ | ++ |
| 5′ spacer 6 | 502 | 12 | 3′ spacer 3 | 1419 | 8 | ++ | ++ |
| 5′ spacer 6 | 500 | 8 | 3′ spacer 3 | 1420 | 10 | +++ | +++ |
| 5′ spacer 6 | 501 | 10 | 3′ spacer 3 | 1420 | 10 | +++ | +++ |
| 5′ spacer 6 | 502 | 12 | 3′ spacer 3 | 1420 | 10 | +++ | +++ |
| 5′ spacer 6 | 500 | 8 | 3′ spacer 4 | 1521 | 12 | + | ++ |
| 5′ spacer 6 | 500 | 8 | 3′ spacer 4 | 1519 | 8 | + | + |
| 5′ spacer 6 | 500 | 8 | 3′ spacer 4 | 1520 | 10 | ++ | ++ |
| 5′ spacer 6 | 502 | 12 | 3′ spacer 4 | 1520 | 10 | + | ++ |
| 5′ spacer 6 | 501 | 10 | 3′ spacer 4 | 1519 | 8 | + | + |
| 5′ spacer 6 | 502 | 12 | 3′ spacer 4 | 1521 | 12 | + | ++ |
| 5′ spacer 6 | 502 | 12 | 3′ spacer 4 | 1519 | 8 | + | + |
| 5′ spacer 6 | 501 | 10 | 3′ spacer 4 | 1521 | 12 | ++ | +++ |
| 5′ spacer 6 | 501 | 10 | 3′ spacer 4 | 1520 | 10 | + | ++ |
| 5′ spacer 6 | 502 | 12 | 3′ spacer 5 | 1542 | 10 | + | +++ |
| 5′ spacer 6 | 500 | 8 | 3′ spacer 5 | 1541 | 8 | + | +++ |
| 5′ spacer 6 | 500 | 8 | 3′ spacer 5 | 1543 | 12 | + | +++ |
| 5′ spacer 6 | 502 | 12 | 3′ spacer 5 | 1541 | 8 | + | +++ |
| 5′ spacer 6 | 501 | 10 | 3′ spacer 5 | 1541 | 8 | + | +++ |
| 5′ spacer 6 | 502 | 12 | 3′ spacer 5 | 1543 | 12 | + | +++ |
| 5′ spacer 6 | 501 | 10 | 3′ spacer 5 | 1542 | 10 | + | +++ |
| 5′ spacer 6 | 501 | 10 | 3′ spacer 5 | 1543 | 12 | + | +++ |
| 5′ spacer 6 | 500 | 8 | 3′ spacer 5 | 1542 | 10 | + | +++ |

[1293] A total of fifteen (15) 5′ PEgRNAs and fifteen (15) 3′ PEgRNAs (total 225 PEgRNA combinations) were screened. The 5′ PEgRNA spacers that were screened were 5′ spacers 1 and 3-6 (SEQ ID NOs:1, 39, 58, 77, and 484, respectively). The 3′ PEgRNA spacers that were screened were 3′ spacers 1-5 (SEQ ID NOs: 1359, 1381, 1403, 1503, and 1525, respectively). The 5′ PEgRNA and 3′ PEgRNA PBS lengths were 8, 10, 11, 12 or 13 nucleotides as indicated in Table 51. For each spacer, successful dual prime editing was observed in a portion of the PEgRNAs examined. Specifically, efficient editing was observed for 5′ PEgRNAs having 5′ spacer No. 5 and for 3′ PEgRNAs having 3′ spacer No. 5.

### Example 3. Screening of PEgRNA for Excising CTG Repeats Associated with Myotonic Dystrophy Type I (DM1)

[1294] A PEgRNA library was designed to replace the CTG repeats in the DMPK gene with an exogenous 38 nt attB sequence. PEgRNAs were assembled as described in Example 1. Wild type HEK 293T cells were transfected with polynucleotides encoding a prime editor fusion protein and a pair of PEgRNAs in arrayed 96-well plates for assessment of editing by high-throughput sequencing. Three days after transfection, gDNA was harvested in lysis buffer for high throughput sequencing and sequenced using MiSeq.

[1295] Editing efficiency of dual prime editing is reflected by excision of the 5 CTG repeats in wildtype HEK293T cells and integration of the attB sequence encoded by the RTTs of the PEgRNA pair. The editing efficiency and indel frequency in HEK293T cells were assessed as follows: Editing % and indel % were determined by version 1 CRISPResso2 dual-flap analysis pipeline. Reads were mapped to both a wild type and an expected theoretical edited reference sequence to interpolate editing efficiency (“% editing efficiency”). Three values were computed for indel rates: (a) forward spacer indels (“% indel_Forward”), (b) reverse spacer indels (“% indel_Reverse”), and (c) inter-nick indels (“% indel_nick_to_nick”). For (a) and (b), a +/−1 bp window around the spacer nick site was used for calculating indels. For (c), the window between the forward spacer nick to the reverse spacer nick site were used for indel calculation. The window size in (c) depends on the spacer pair tested.

[1296] The results are summarized in Table 52. In Table 52, each row presents information for a pair of PEgRNAs (i.e., a 5′ PEgRNA and a 3′ PEgRNA) used in dual prime editing. Each PEgRNA is identified by a sequence identifier (“SEQ ID NO”), and information is also presented for the spacer number and PBS length of each PEgRNA that was tested. The following scale was used for editing efficiency: PEgRNA pairs exhibiting editing efficiency above 0% and up to 25% are indicated with “+”, PEgRNA pairs exhibiting editing efficiency above 25% and up to 50% are indicated with “++”, PEgRNA pairs exhibiting editing efficiency above 50% and up to 75% are indicated with “+++”, and PEgRNA pairs exhibiting editing efficiency above 75% and up to 100% are indicated with “++++”. The following scale was used for indel rates: PEgRNA pairs exhibiting indel rates above 0% and up to 7.5% are indicated with “+”, PEgRNA pairs exhibiting indel rates above 7.5% and up to 15% are indicated with “++”, PEgRNA pairs exhibiting indel rates above 15% and up to 22.5% are indicated with “+++”, PEgRNA pairs exhibiting indel rates above 22.5% are indicated with “++++”. “NA” indicates there were insufficient reads for sequencing.

TABLE 52
Dual prime editing pegRNA screen for CTG excision in HEK 293T cells.

| | 5′ PEgRNA | 5′ PBS | | 3′ PEgRNA | 3′ PBS | % editing | % Indel | % Indel | % Indel |
|---|---|---|---|---|---|---|---|---|---|
| 5′ spacer | SEQ ID NO: | length | 3′ spacer | SEQ ID NO: | length | efficiency | Forward | Reverse | Nick to nick |
| 5′ spacer 10 | 588 | 10 | 3′ spacer 9 | 1934 | 10 | ++++ | + | + | + |
| 5′ spacer 10 | 588 | 10 | 3′ spacer 9 | 1935 | 12 | ++++ | NA | + | + |
| 5′ spacer 10 | 588 | 10 | 3′ spacer 10 | 1952 | 10 | ++++ | + | + | + |
| 5′ spacer 10 | 588 | 10 | 3′ spacer 10 | 1953 | 12 | ++++ | + | + | + |
| 5′ spacer 10 | 588 | 10 | 3′ spacer 11 | 2279 | 10 | +++ | + | + | +++ |
| 5′ spacer 10 | 588 | 10 | 3′ spacer 11 | 2280 | 12 | ++++ | + | + | +++ |
| 5′ spacer 10 | 588 | 10 | 3′ spacer 16 | 2369 | 10 | ++++ | + | + | ++ |
| 5′ spacer 10 | 588 | 10 | 3′ spacer 12 | 2297 | 10 | ++++ | + | + | ++ |
| 5′ spacer 10 | 588 | 10 | 3′ spacer 12 | 2298 | 12 | ++++ | + | + | ++ |
| 5′ spacer 10 | 588 | 10 | 3′ spacer 17 | 2689 | 10 | ++++ | + | + | +++ |
| 5′ spacer 10 | 588 | 10 | 3′ spacer 17 | 2690 | 12 | ++++ | + | + | ++ |
| 5′ spacer 10 | 588 | 10 | 3′ spacer 5 | 1543 | 12 | ++++ | + | NA | ++ |
| 5′ spacer 10 | 588 | 10 | 3′ spacer 13 | 2315 | 10 | +++ | + | NA | +++ |
| 5′ spacer 10 | 588 | 10 | 3′ spacer 13 | 2316 | 12 | ++++ | + | NA | +++ |
| 5′ spacer 10 | 588 | 10 | 3′ spacer 14 | 2333 | 10 | ++++ | + | NA | ++ |
| 5′ spacer 10 | 588 | 10 | 3′ spacer 14 | 2334 | 12 | ++++ | + | NA | ++ |
| 5′ spacer 10 | 588 | 10 | 3′ spacer 6 | 1880 | 11 | ++++ | + | + | + |
| 5′ spacer 10 | 588 | 10 | 3′ spacer 6 | 1881 | 13 | ++++ | + | + | + |
| 5′ spacer 10 | 588 | 10 | 3′ spacer 15 | 2352 | 12 | ++++ | + | + | + |
| 5′ spacer 10 | 589 | 13 | 3′ spacer 10 | 1952 | 10 | ++++ | + | + | + |
| 5′ spacer 10 | 589 | 13 | 3′ spacer 10 | 1953 | 12 | ++++ | + | + | + |
| 5′ spacer 10 | 589 | 13 | 3′ spacer 11 | 2279 | 10 | ++++ | + | + | +++ |
| 5′ spacer 10 | 589 | 13 | 3′ spacer 11 | 2280 | 12 | ++++ | + | + | +++ |
| 5′ spacer 10 | 589 | 13 | 3′ spacer 16 | 2369 | 10 | ++++ | + | + | ++ |
| 5′ spacer 10 | 589 | 13 | 3′ spacer 12 | 2297 | 10 | ++++ | + | + | ++ |
| 5′ spacer 10 | 589 | 13 | 3′ spacer 12 | 2298 | 12 | ++++ | + | + | ++ |
| 5′ spacer 10 | 589 | 13 | 3′ spacer 17 | 2689 | 10 | ++++ | + | + | +++ |
| 5′ spacer 10 | 589 | 13 | 3′ spacer 17 | 2690 | 12 | ++++ | + | + | +++ |
| 5′ spacer 10 | 589 | 13 | 3′ spacer 5 | 1543 | 12 | ++++ | + | NA | ++ |
| 5′ spacer 10 | 589 | 13 | 3′ spacer 13 | 2315 | 10 | ++++ | + | NA | +++ |
| 5′ spacer 10 | 589 | 13 | 3′ spacer 13 | 2316 | 12 | +++ | + | NA | ++ |
| 5′ spacer 10 | 589 | 13 | 3′ spacer 14 | 2333 | 10 | ++++ | + | NA | ++ |
| 5′ spacer 10 | 589 | 13 | 3′ spacer 14 | 2334 | 12 | ++++ | + | NA | ++ |
| 5′ spacer 10 | 589 | 13 | 3′ spacer 15 | 2352 | 12 | ++++ | + | + | + |
| 5′ spacer 11 | 606 | 10 | 3′ spacer 8 | 1916 | 10 | + | + | + | + |
| 5′ spacer 11 | 606 | 10 | 3′ spacer 9 | 1934 | 10 | ++++ | + | + | + |
| 5′ spacer 11 | 606 | 10 | 3′ spacer 9 | 1935 | 12 | ++++ | + | + | + |
| 5′ spacer 11 | 606 | 10 | 3′ spacer 10 | 1952 | 10 | ++++ | + | + | + |
| 5′ spacer 11 | 606 | 10 | 3′ spacer 10 | 1953 | 12 | ++++ | + | + | + |
| 5′ spacer 11 | 606 | 10 | 3′ spacer 11 | 2279 | 10 | ++ | + | + | + |
| 5′ spacer 11 | 606 | 10 | 3′ spacer 11 | 2280 | 12 | +++ | + | + | + |
| 5′ spacer 11 | 606 | 10 | 3′ spacer 16 | 2369 | 10 | ++++ | + | + | ++ |
| 5′ spacer 11 | 606 | 10 | 3′ spacer 12 | 2297 | 10 | +++ | + | + | +++ |
| 5′ spacer 11 | 606 | 10 | 3′ spacer 12 | 2298 | 12 | +++ | + | + | ++ |
| 5′ spacer 11 | 606 | 10 | 3′ spacer 17 | 2689 | 10 | +++ | + | + | ++ |
| 5′ spacer 11 | 606 | 10 | 3′ spacer 17 | 2690 | 12 | ++++ | + | + | ++ |
| 5′ spacer 11 | 606 | 10 | 3′ spacer 5 | 1543 | 12 | + | + | + | ++ |
| 5′ spacer 11 | 60€ | 10 | 3′ spacer 13 | 2315 | 10 | +++ | + | + | +++ |
| 5′ spacer 11 | 606 | 10 | 3′ spacer 13 | 2316 | 12 | +++ | + | + | +++ |
| 5′ spacer 11 | 606 | 10 | 3′ spacer 14 | 2333 | 10 | +++ | + | NA | +++ |
| 5′ spacer 11 | 606 | 10 | 3′ spacer 14 | 2334 | 12 | +++ | + | NA | +++ |
| 5′ spacer 11 | 606 | 10 | 3′ spacer 6 | 1880 | 11 | +++ | + | + | + |
| 5′ spacer 11 | 606 | 10 | 3′ spacer 6 | 1881 | 13 | ++++ | + | + | + |
| 5′ spacer 11 | 606 | 10 | 3′ spacer 15 | 2352 | 12 | ++ | + | + | + |
| 5′ spacer 11 | 606 | 10 | 3′ spacer 7 | 1898 | 11 | ++++ | + | + | + |
| 5′ spacer 11 | 606 | 10 | 3′ spacer 7 | 1899 | 13 | ++++ | + | + | + |
| 5′ spacer 11 | 606 | 10 | 3′ spacer 2 | 1399 | 12 | + | + | + | ++ |
| 5′ spacer 11 | 607 | 12 | 3′ spacer 8 | 1916 | 10 | + | + | + | + |
| 5′ spacer 11 | 607 | 12 | 3′ spacer 9 | 1934 | 10 | ++++ | + | + | + |
| 5′ spacer 11 | 607 | 12 | 3′ spacer 9 | 1935 | 12 | ++++ | + | + | + |
| 5′ spacer 11 | 607 | 12 | 3′ spacer 11 | 2279 | 10 | ++ | + | + | + |
| 5′ spacer 11 | 607 | 12 | 3′ spacer 11 | 2280 | 12 | ++++ | + | + | + |
| 5′ spacer 11 | 607 | 12 | 3′ spacer 16 | 2369 | 10 | ++++ | + | + | ++ |
| 5′ spacer 11 | 607 | 12 | 3′ spacer 12 | 2297 | 10 | +++ | + | + | ++ |
| 5′ spacer 11 | 607 | 12 | 3′ spacer 12 | 2298 | 12 | ++ | NA | + | +++ |
| 5′ spacer 11 | 607 | 12 | 3′ spacer 17 | 2689 | 10 | +++ | + | + | ++ |
| 5′ spacer 11 | 607 | 12 | 3′ spacer 17 | 2690 | 12 | ++++ | + | + | ++ |
| 5′ spacer 11 | 607 | 12 | 3′ spacer 5 | 1543 | 12 | + | + | + | + |
| 5′ spacer 11 | 607 | 12 | 3′ spacer 13 | 2315 | 10 | +++ | + | + | +++ |
| 5′ spacer 11 | 607 | 12 | 3′ spacer 13 | 2316 | 12 | ++ | + | + | ++ |
| 5′ spacer 11 | 607 | 12 | 3′ spacer 14 | 2333 | 10 | ++++ | + | NA | +++ |
| 5′ spacer 11 | 607 | 12 | 3′ spacer 14 | 2334 | 12 | ++++ | + | NA | ++++ |
| 5′ spacer 11 | 607 | 12 | 3′ spacer 6 | 1880 | 11 | ++ | + | + | + |
| 5′ spacer 11 | 607 | 12 | 3′ spacer 6 | 1881 | 13 | +++ | + | + | + |
| 5′ spacer 11 | 607 | 12 | 3′ spacer 15 | 2352 | 12 | +++ | + | + | + |
| 5′ spacer 11 | 607 | 12 | 3′ spacer 7 | 1898 | 11 | ++++ | + | + | + |
| 5′ spacer 11 | 607 | 12 | 3′ spacer 7 | 1899 | 13 | ++++ | + | + | + |
| 5′ spacer 11 | 607 | 12 | 3′ spacer 2 | 1399 | 12 | + | + | + | ++ |
| 5′ spacer 12 | 927 | 11 | 3′ spacer 8 | 1916 | 10 | +++ | + | + | + |
| 5′ spacer 12 | 927 | 11 | 3′ spacer 9 | 1934 | 10 | + | + | + | ++ |
| 5′ spacer 12 | 927 | 11 | 3′ spacer 9 | 1935 | 12 | + | NA | NA | + |
| 5′ spacer 12 | 927 | 11 | 3′ spacer 10 | 1952 | 10 | +++ | + | + | + |
| 5′ spacer 12 | 927 | 11 | 3′ spacer 10 | 1953 | 12 | ++++ | + | + | + |
| 5′ spacer 12 | 927 | 11 | 3′ spacer 11 | 2279 | 10 | +++ | + | + | + |
| 5′ spacer 12 | 927 | 11 | 3′ spacer 11 | 2280 | 12 | +++ | + | + | + |
| 5′ spacer 12 | 927 | 11 | 3′ spacer 16 | 2369 | 10 | +++ | + | + | + |
| 5′ spacer 12 | 927 | 11 | 3′ spacer 16 | 2370 | 12 | +++ | + | + | + |
| 5′ spacer 12 | 927 | 11 | 3′ spacer 12 | 2297 | 10 | ++ | + | + | + |
| 5′ spacer 12 | 927 | 11 | 3′ spacer 12 | 2298 | 12 | +++ | + | + | ++ |
| 5′ spacer 12 | 927 | 11 | 3′ spacer 17 | 2689 | 10 | ++++ | + | + | + |
| 5′ spacer 12 | 927 | 11 | 3′ spacer 17 | 2690 | 12 | ++++ | + | + | + |
| 5′ spacer 12 | 927 | 11 | 3′ spacer 5 | 1543 | 12 | ++++ | + | + | ++ |
| 5′ spacer 12 | 927 | 11 | 3′ spacer 13 | 2315 | 10 | ++++ | + | + | ++ |
| 5′ spacer 12 | 927 | 11 | 3′ spacer 13 | 2316 | 12 | ++++ | + | + | +++ |
| 5′ spacer 12 | 927 | 11 | 3′ spacer 14 | 2333 | 10 | ++++ | + | + | +++ |
| 5′ spacer 12 | 927 | 11 | 3′ spacer 14 | 2334 | 12 | ++++ | + | + | +++ |
| 5′ spacer 12 | 927 | 11 | 3′ spacer 6 | 1880 | 11 | + | + | + | + |
| 5′ spacer 12 | 927 | 11 | 3′ spacer 6 | 1881 | 13 | ++ | + | + | + |
| 5′ spacer 12 | 927 | 11 | 3′ spacer 15 | 2351 | 10 | +++ | + | + | + |
| 5′ spacer 12 | 927 | 11 | 3′ spacer 15 | 2352 | 12 | +++ | + | + | + |
| 5′ spacer 12 | 927 | 11 | 3′ spacer 7 | 1898 | 11 | + | + | + | + |
| 5′ spacer 12 | 927 | 11 | 3′ spacer 7 | 1899 | 13 | + | + | + | + |
| 5′ spacer 12 | 927 | 11 | 3′ spacer 2 | 1399 | 12 | +++ | + | + | + |
| 5′ spacer 12 | 928 | 13 | 3′ spacer 8 | 1916 | 10 | + | + | + | + |
| 5′ spacer 12 | 928 | 13 | 3′ spacer 9 | 1935 | 12 | + | + | + | ++ |
| 5′ spacer 12 | 928 | 13 | 3′ spacer 10 | 1952 | 10 | ++++ | + | + | + |
| 5′ spacer 12 | 928 | 13 | 3′ spacer 10 | 1953 | 12 | ++++ | + | + | + |
| 5′ spacer 12 | 928 | 13 | 3′ spacer 11 | 2279 | 10 | +++ | + | + | + |
| 5′ spacer 12 | 928 | 13 | 3′ spacer 11 | 2280 | 12 | +++ | + | + | + |
| 5′ spacer 12 | 928 | 13 | 3′ spacer 16 | 2369 | 10 | +++ | + | + | + |
| 5′ spacer 12 | 928 | 13 | 3′ spacer 16 | 2370 | 12 | ++ | + | + | + |
| 5′ spacer 12 | 928 | 13 | 3′ spacer 12 | 2297 | 10 | +++ | + | + | + |
| 5′ spacer 12 | 928 | 13 | 3′ spacer 12 | 2298 | 12 | +++ | + | + | + |
| 5′ spacer 12 | 928 | 13 | 3′ spacer 17 | 2689 | 10 | ++++ | + | + | + |
| 5′ spacer 12 | 928 | 13 | 3′ spacer 17 | 2690 | 12 | ++++ | + | + | + |
| 5′ spacer 12 | 928 | 13 | 3′ spacer 5 | 1543 | 12 | ++++ | + | + | ++ |
| 5′ spacer 12 | 928 | 13 | 3′ spacer 13 | 2315 | 10 | ++++ | + | + | ++ |
| 5′ spacer 12 | 928 | 13 | 3′ spacer 13 | 2316 | 12 | ++++ | ++ | + | ++++ |
| 5′ spacer 12 | 928 | 13 | 3′ spacer 14 | 2333 | 10 | +++ | + | + | ++ |
| 5′ spacer 12 | 928 | 13 | 3′ spacer 14 | 2334 | 12 | ++++ | + | + | +++ |
| 5′ spacer 12 | 928 | 13 | 3′ spacer 6 | 1880 | 11 | + | + | + | ++ |
| 5′ spacer 12 | 928 | 13 | 3′ spacer 6 | 1881 | 13 | ++ | + | + | + |
| 5′ spacer 12 | 928 | 13 | 3′ spacer 15 | 2351 | 10 | ++ | + | + | + |
| 5′ spacer 12 | 928 | 13 | 3′ spacer 15 | 2352 | 12 | +++ | + | + | + |
| 5′ spacer 12 | 928 | 13 | 3′ spacer 7 | 1898 | 11 | + | + | + | + |
| 5′ spacer 12 | 928 | 13 | 3′ spacer 7 | 1899 | 13 | + | + | + | + |
| 5′ spacer 12 | 928 | 13 | 3′ spacer 2 | 1399 | 12 | ++ | + | + | + |
| 5′ spacer 13 | 945 | 10 | 3′ spacer 8 | 1916 | 10 | ++++ | + | + | ++ |
| 5′ spacer 13 | 945 | 10 | 3′ spacer 9 | 1934 | 10 | ++++ | + | + | +++ |
| 5′ spacer 13 | 945 | 10 | 3′ spacer 9 | 1935 | 12 | ++++ | + | + | +++ |
| 5′ spacer 13 | 945 | 10 | 3′ spacer 10 | 1952 | 10 | ++++ | + | NA | ++ |
| 5′ spacer 13 | 945 | 10 | 3′ spacer 10 | 1953 | 12 | ++++ | + | NA | ++ |
| 5′ spacer 13 | 945 | 10 | 3′ spacer 11 | 2279 | 10 | ++++ | + | NA | ++ |
| 5′ spacer 13 | 945 | 10 | 3′ spacer 11 | 2280 | 12 | ++++ | + | NA | ++ |
| 5′ spacer 13 | 945 | 10 | 3′ spacer 16 | 2369 | 10 | ++++ | + | NA | + |
| 5′ spacer 13 | 945 | 10 | 3′ spacer 16 | 2370 | 12 | ++++ | + | NA | + |
| 5′ spacer 13 | 945 | 10 | 3′ spacer 12 | 2297 | 10 | +++ | + | NA | + |
| 5′ spacer 13 | 945 | 10 | 3′ spacer 12 | 2298 | 12 | ++++ | + | NA | + |
| 5′ spacer 13 | 945 | 10 | 3′ spacer 17 | 2689 | 10 | ++++ | + | NA | + |
| 5′ spacer 13 | 945 | 10 | 3′ spacer 17 | 2690 | 12 | ++++ | + | NA | + |
| 5′ spacer 13 | 945 | 10 | 3′ spacer 6 | 1880 | 11 | ++++ | + | + | + |
| 5′ spacer 13 | 945 | 10 | 3′ spacer 6 | 1881 | 13 | ++++ | + | + | + |
| 5′ spacer 13 | 945 | 10 | 3′ spacer 15 | 2351 | 10 | ++++ | + | + | ++++ |
| 5′ spacer 13 | 945 | 10 | 3′ spacer 15 | 2352 | 12 | ++++ | + | + | ++++ |
| 5′ spacer 13 | 945 | 10 | 3′ spacer 7 | 1898 | 11 | ++++ | + | + | ++ |
| 5′ spacer 13 | 945 | 10 | 3′ spacer 7 | 1899 | 13 | ++++ | + | + | ++ |
| 5′ spacer 13 | 945 | 10 | 3′ spacer 2 | 1399 | 12 | ++++ | + | + | ++ |
| 5′ spacer 13 | 946 | 12 | 3′ spacer 8 | 1916 | 10 | ++++ | + | + | ++ |
| 5′ spacer 13 | 946 | 12 | 3′ spacer 9 | 1934 | 10 | ++++ | + | + | +++ |
| 5′ spacer 13 | 946 | 12 | 3′ spacer 9 | 1935 | 12 | ++++ | + | + | +++ |
| 5′ spacer 13 | 946 | 12 | 3′ spacer 10 | 1952 | 10 | ++++ | + | NA | ++ |
| 5′ spacer 13 | 946 | 12 | 3′ spacer 10 | 1953 | 12 | ++++ | + | NA | ++ |
| 5′ spacer 13 | 946 | 12 | 3′ spacer 11 | 2279 | 10 | ++++ | + | NA | ++ |
| 5′ spacer 13 | 946 | 12 | 3′ spacer 11 | 2280 | 12 | ++++ | + | NA | ++ |
| 5′ spacer 13 | 946 | 12 | 3′ spacer 16 | 2369 | 10 | ++++ | + | NA | + |
| 5′ spacer 13 | 946 | 12 | 3′ spacer 16 | 2370 | 12 | ++++ | + | NA | + |
| 5′ spacer 13 | 946 | 12 | 3′ spacer 12 | 2297 | 10 | +++ | + | NA | + |
| 5′ spacer 13 | 946 | 12 | 3′ spacer 12 | 2298 | 12 | ++++ | + | NA | + |
| 5′ spacer 13 | 946 | 12 | 3′ spacer 17 | 2689 | 10 | +++ | + | NA | + |
| 5′ spacer 13 | 946 | 12 | 3′ spacer 17 | 2690 | 12 | ++++ | + | NA | + |
| 5′ spacer 13 | 946 | 12 | 3′ spacer 6 | 1880 | 11 | ++++ | + | + | + |
| 5′ spacer 13 | 946 | 12 | 3′ spacer 6 | 1881 | 13 | ++++ | + | + | + |
| 5′ spacer 13 | 946 | 12 | 3′ spacer 15 | 2351 | 10 | ++++ | + | + | ++++ |
| 5′ spacer 13 | 946 | 12 | 3′ spacer 15 | 2352 | 12 | ++++ | + | + | ++++ |
| 5′ spacer 13 | 946 | 12 | 3′ spacer 7 | 1898 | 11 | ++++ | + | + | ++ |
| 5′ spacer 13 | 946 | 12 | 3′ spacer 7 | 1899 | 13 | ++++ | + | + | ++ |
| 5′ spacer 13 | 946 | 12 | 3′ spacer 2 | 1399 | 12 | ++++ | + | + | ++ |
| 5′ spacer 14 | 963 | 10 | 3′ spacer 8 | 1916 | 10 | ++++ | + | + | +++ |
| 5′ spacer 14 | 963 | 10 | 3′ spacer 9 | 1934 | 10 | ++++ | + | + | +++ |
| 5′ spacer 14 | 963 | 10 | 3′ spacer 9 | 1935 | 12 | ++++ | + | + | +++ |
| 5′ spacer 14 | 963 | 10 | 3′ spacer 10 | 1952 | 10 | ++++ | + | + | ++ |
| 5′ spacer 14 | 963 | 10 | 3′ spacer 10 | 1953 | 12 | ++++ | + | + | ++ |
| 5′ spacer 14 | 963 | 10 | 3′ spacer 11 | 2279 | 10 | ++++ | + | + | ++ |
| 5′ spacer 14 | 963 | 10 | 3′ spacer 11 | 2280 | 12 | ++++ | + | + | ++ |
| 5′ spacer 14 | 963 | 10 | 3′ spacer 16 | 2369 | 10 | ++++ | + | + | +++ |
| 5′ spacer 14 | 963 | 10 | 3′ spacer 16 | 2370 | 12 | ++++ | + | + | +++ |
| 5′ spacer 14 | 963 | 10 | 3′ spacer 12 | 2297 | 10 | ++++ | + | NA | ++ |
| 5′ spacer 14 | 963 | 10 | 3′ spacer 12 | 2298 | 12 | ++++ | + | NA | ++ |
| 5′ spacer 14 | 963 | 10 | 3′ spacer 17 | 2689 | 10 | ++++ | + | NA | + |
| 5′ spacer 14 | 963 | 10 | 3′ spacer 17 | 2690 | 12 | ++++ | + | NA | + |
| 5′ spacer 14 | 963 | 10 | 3′ spacer 5 | 1543 | 12 | ++++ | + | NA | + |
| 5′ spacer 14 | 963 | 10 | 3′ spacer 6 | 1880 | 11 | ++++ | + | + | + |
| 5′ spacer 14 | 963 | 10 | 3′ spacer 6 | 1881 | 13 | ++++ | + | + | + |
| 5′ spacer 14 | 963 | 10 | 3′ spacer 15 | 2351 | 10 | ++++ | + | + | + |
| 5′ spacer 14 | 963 | 10 | 3′ spacer 15 | 2352 | 12 | ++++ | + | + | + |
| 5′ spacer 14 | 963 | 10 | 3′ spacer 7 | 1898 | 11 | ++++ | + | + | +++ |
| 5′ spacer 14 | 963 | 10 | 3′ spacer 7 | 1899 | 13 | ++++ | + | + | +++ |
| 5′ spacer 14 | 963 | 10 | 3′ spacer 2 | 1399 | 12 | ++++ | + | + | +++ |
| 5′ spacer 14 | 964 | 12 | 3′ spacer 8 | 1916 | 10 | ++++ | + | + | +++ |
| 5′ spacer 14 | 964 | 12 | 3′ spacer 9 | 1934 | 10 | ++++ | + | + | +++ |
| 5′ spacer 14 | 964 | 12 | 3′ spacer 9 | 1935 | 12 | ++++ | + | + | +++ |
| 5′ spacer 14 | 964 | 12 | 3′ spacer 10 | 1952 | 10 | ++++ | + | + | ++ |
| 5′ spacer 14 | 964 | 12 | 3′ spacer 10 | 1953 | 12 | ++++ | + | + | ++ |
| 5′ spacer 14 | 964 | 12 | 3′ spacer 11 | 2279 | 10 | ++++ | + | + | ++ |
| 5′ spacer 14 | 964 | 12 | 3′ spacer 11 | 2280 | 12 | ++++ | + | + | ++ |
| 5′ spacer 14 | 964 | 12 | 3′ spacer 16 | 2369 | 10 | ++++ | + | + | +++ |
| 5′ spacer 14 | 964 | 12 | 3′ spacer 16 | 2370 | 12 | ++++ | + | + | +++ |
| 5′ spacer 14 | 964 | 12 | 3′ spacer 12 | 2297 | 10 | ++++ | + | NA | ++ |
| 5′ spacer 14 | 964 | 12 | 3′ spacer 12 | 2298 | 12 | ++++ | + | NA | ++ |
| 5′ spacer 14 | 964 | 12 | 3′ spacer 17 | 2689 | 10 | ++++ | + | NA | + |
| 5′ spacer 14 | 964 | 12 | 3′ spacer 17 | 2690 | 12 | ++++ | + | NA | + |
| 5′ spacer 14 | 964 | 12 | 3′ spacer 5 | 1543 | 12 | ++++ | + | NA | + |
| 5′ spacer 14 | 964 | 12 | 3′ spacer 6 | 1880 | 11 | ++++ | + | + | + |
| 5′ spacer 14 | 964 | 12 | 3′ spacer 6 | 1881 | 13 | +++ | + | + | + |
| 5′ spacer 14 | 964 | 12 | 3′ spacer 15 | 2351 | 10 | +++ | + | + | + |
| 5′ spacer 14 | 964 | 12 | 3′ spacer 15 | 2352 | 12 | ++++ | + | + | + |
| 5′ spacer 14 | 964 | 12 | 3′ spacer 7 | 1898 | 11 | ++++ | + | + | +++ |
| 5′ spacer 14 | 964 | 12 | 3′ spacer 7 | 1899 | 13 | ++++ | + | + | +++ |
| 5′ spacer 14 | 964 | 12 | 3′ spacer 2 | 1399 | 12 | ++++ | + | + | +++ |
| 5′ spacer 15 | 981 | 10 | 3′ spacer 8 | 1916 | 10 | ++ | + | + | + |
| 5′ spacer 15 | 981 | 10 | 3′ spacer 9 | 1934 | 10 | ++++ | + | + | + |
| 5′ spacer 15 | 981 | 10 | 3′ spacer 9 | 1935 | 12 | + | + | + | + |
| 5′ spacer 15 | 981 | 10 | 3′ spacer 10 | 1952 | 10 | ++++ | + | + | + |
| 5′ spacer 15 | 981 | 10 | 3′ spacer 10 | 1953 | 12 | +++ | + | + | + |
| 5′ spacer 15 | 981 | 10 | 3′ spacer 11 | 2279 | 10 | ++ | + | + | + |
| 5′ spacer 15 | 981 | 10 | 3′ spacer 11 | 2280 | 12 | +++ | + | + | + |
| 5′ spacer 15 | 981 | 10 | 3′ spacer 16 | 2369 | 10 | +++ | + | + | + |
| 5′ spacer 15 | 981 | 10 | 3′ spacer 16 | 2370 | 12 | +++ | + | + | + |
| 5′ spacer 15 | 981 | 10 | 3′ spacer 12 | 2297 | 10 | +++ | + | + | ++ |
| 5′ spacer 15 | 981 | 10 | 3′ spacer 12 | 2298 | 12 | +++ | + | + | ++ |
| 5′ spacer 15 | 981 | 10 | 3′ spacer 17 | 2689 | 10 | +++ | + | + | +++ |
| 5′ spacer 15 | 981 | 10 | 3′ spacer 17 | 2690 | 12 | ++++ | + | + | +++ |
| 5′ spacer 15 | 981 | 10 | 3′ spacer 5 | 1543 | 12 | ++++ | + | + | ++ |
| 5′ spacer 15 | 981 | 10 | 3′ spacer 13 | 2315 | 10 | +++ | + | + | ++ |
| 5′ spacer 15 | 981 | 10 | 3′ spacer 13 | 2316 | 12 | ++++ | + | + | + |
| 5′ spacer 15 | 981 | 10 | 3′ spacer 14 | 2333 | 10 | ++++ | + | + | ++ |
| 5′ spacer 15 | 981 | 10 | 3′ spacer 14 | 2334 | 12 | ++++ | + | + | +++ |
| 5′ spacer 15 | 981 | 10 | 3′ spacer 6 | 1880 | 11 | ++ | + | + | + |
| 5′ spacer 15 | 981 | 10 | 3′ spacer 6 | 1881 | 13 | ++++ | + | + | + |
| 5′ spacer 15 | 981 | 10 | 3′ spacer 15 | 2351 | 10 | ++ | + | + | + |
| 5′ spacer 15 | 981 | 10 | 3′ spacer 15 | 2352 | 12 | +++ | + | + | + |
| 5′ spacer 15 | 981 | 10 | 3′ spacer 7 | 1898 | 11 | +++ | + | + | + |
| 5′ spacer 15 | 981 | 10 | 3′ spacer 7 | 1899 | 13 | +++ | + | + | + |
| 5′ spacer 15 | 981 | 10 | 3′ spacer 2 | 1399 | 12 | ++ | + | + | + |
| 5′ spacer 15 | 982 | 12 | 3′ spacer 8 | 1916 | 10 | ++++ | + | + | + |
| 5′ spacer 15 | 982 | 12 | 3′ spacer 9 | 1934 | 10 | +++ | + | + | + |
| 5′ spacer 15 | 982 | 12 | 3′ spacer 9 | 1935 | 12 | ++ | + | + | + |
| 5′ spacer 15 | 982 | 12 | 3′ spacer 10 | 1952 | 10 | ++ | + | + | + |
| 5′ spacer 15 | 982 | 12 | 3′ spacer 10 | 1953 | 12 | ++ | + | + | + |
| 5′ spacer 15 | 982 | 12 | 3′ spacer 11 | 2279 | 10 | + | + | + | + |
| 5′ spacer 15 | 982 | 12 | 3′ spacer 11 | 2280 | 12 | ++ | + | + | + |
| 5′ spacer 15 | 982 | 12 | 3′ spacer 16 | 2369 | 10 | + | + | + | ++ |
| 5′ spacer 15 | 982 | 12 | 3′ spacer 16 | 2370 | 12 | + | + | + | ++ |
| 5′ spacer 15 | 982 | 12 | 3′ spacer 12 | 2297 | 10 | + | + | + | ++ |
| 5′ spacer 15 | 982 | 12 | 3′ spacer 12 | 2298 | 12 | + | + | + | + |
| 5′ spacer 15 | 982 | 12 | 3′ spacer 17 | 2689 | 10 | + | + | + | ++++ |
| 5′ spacer 15 | 982 | 12 | 3′ spacer 17 | 2690 | 12 | + | + | + | ++++ |
| 5′ spacer 15 | 982 | 12 | 3′ spacer 5 | 1543 | 12 | ++ | + | + | ++++ |
| 5′ spacer 15 | 982 | 12 | 3′ spacer 13 | 2315 | 10 | +++ | + | + | ++ |
| 5′ spacer 15 | 982 | 12 | 3′ spacer 13 | 2316 | 12 | +++ | + | + | ++ |
| 5′ spacer 15 | 982 | 12 | 3′ spacer 14 | 2333 | 10 | + | + | + | +++ |
| 5′ spacer 15 | 982 | 12 | 3′ spacer 14 | 2334 | 12 | +++ | + | + | ++ |
| 5′ spacer 15 | 982 | 12 | 3′ spacer 6 | 1880 | 11 | + | + | + | ++ |
| 5′ spacer 15 | 982 | 12 | 3′ spacer 6 | 1881 | 13 | ++ | + | + | + |
| 5′ spacer 15 | 982 | 12 | 3′ spacer 15 | 2351 | 10 | + | + | + | + |
| 5′ spacer 15 | 982 | 12 | 3′ spacer 15 | 2352 | 12 | ++ | + | + | + |
| 5′ spacer 15 | 982 | 12 | 3′ spacer 7 | 1898 | 11 | ++ | + | + | + |
| 5′ spacer 15 | 982 | 12 | 3′ spacer 7 | 1899 | 13 | +++ | + | + | + |
| 5′ spacer 15 | 982 | 12 | 3′ spacer 2 | 1399 | 12 | + | + | + | + |
| 5′ spacer 16 | 999 | 10 | 3′ spacer 8 | 1916 | 10 | ++++ | + | + | + |
| 5′ spacer 16 | 999 | 10 | 3′ spacer 9 | 1934 | 10 | ++++ | + | + | + |
| 5′ spacer 16 | 999 | 10 | 3′ spacer 9 | 1935 | 12 | ++++ | + | + | + |
| 5′ spacer 16 | 999 | 10 | 3′ spacer 10 | 1952 | 10 | ++++ | + | + | + |
| 5′ spacer 16 | 999 | 10 | 3′ spacer 10 | 1953 | 12 | ++++ | + | + | + |
| 5′ spacer 16 | 999 | 10 | 3′ spacer 11 | 2279 | 10 | +++ | + | + | + |
| 5′ spacer 16 | 999 | 10 | 3′ spacer 11 | 2280 | 12 | ++++ | + | + | + |
| 5′ spacer 16 | 999 | 10 | 3′ spacer 16 | 2369 | 10 | ++++ | + | + | + |
| 5′ spacer 16 | 999 | 10 | 3′ spacer 16 | 2370 | 12 | ++++ | + | + | + |
| 5′ spacer 16 | 999 | 10 | 3′ spacer 12 | 2297 | 10 | +++ | + | + | + |
| 5′ spacer 16 | 999 | 10 | 3′ spacer 12 | 2298 | 12 | + | NA | NA | ++ |
| 5′ spacer 16 | 999 | 10 | 3′ spacer 17 | 2689 | 10 | ++++ | + | + | ++ |
| 5′ spacer 16 | 999 | 10 | 3′ spacer 17 | 2690 | 12 | ++++ | + | + | ++ |
| 5′ spacer 16 | 999 | 10 | 3′ spacer 5 | 1543 | 12 | ++++ | + | + | +++ |
| 5′ spacer 16 | 999 | 10 | 3′ spacer 13 | 2315 | 10 | ++++ | + | + | +++ |
| 5′ spacer 16 | 999 | 10 | 3′ spacer 13 | 2316 | 12 | ++++ | + | + | +++ |
| 5′ spacer 16 | 999 | 10 | 3′ spacer 14 | 2333 | 10 | ++++ | + | + | +++ |
| 5′ spacer 16 | 999 | 10 | 3′ spacer 14 | 2334 | 12 | ++++ | + | + | ++ |
| 5′ spacer 16 | 999 | 10 | 3′ spacer 6 | 1880 | 11 | +++ | + | + | + |
| 5′ spacer 16 | 999 | 10 | 3′ spacer 6 | 1881 | 13 | +++ | + | + | + |
| 5′ spacer 16 | 999 | 10 | 3′ spacer 15 | 2351 | 10 | +++ | + | + | + |
| 5′ spacer 16 | 999 | 10 | 3′ spacer 15 | 2352 | 12 | +++ | + | + | + |
| 5′ spacer 16 | 999 | 10 | 3′ spacer 7 | 1898 | 11 | +++ | + | + | + |
| 5′ spacer 16 | 999 | 10 | 3′ spacer 7 | 1899 | 13 | ++++ | + | + | + |
| 5′ spacer 16 | 999 | 10 | 3′ spacer 2 | 1399 | 12 | +++ | + | + | + |
| 5′ spacer 16 | 1000 | 12 | 3′ spacer 8 | 1916 | 10 | ++++ | + | + | + |
| 5′ spacer 16 | 1000 | 12 | 3′ spacer 9 | 1934 | 10 | ++++ | + | + | + |
| 5′ spacer 16 | 1000 | 12 | 3′ spacer 9 | 1935 | 12 | ++++ | + | + | + |
| 5′ spacer 16 | 1000 | 12 | 3′ spacer 10 | 1952 | 10 | ++++ | + | + | + |
| 5′ spacer 16 | 1000 | 12 | 3′ spacer 10 | 1953 | 12 | ++++ | + | + | + |
| 5′ spacer 16 | 1000 | 12 | 3′ spacer 11 | 2279 | 10 | +++ | + | + | + |
| 5′ spacer 16 | 1000 | 12 | 3′ spacer 11 | 2280 | 12 | ++++ | + | + | + |
| 5′ spacer 16 | 1000 | 12 | 3′ spacer 16 | 2369 | 10 | ++++ | + | + | + |
| 5′ spacer 16 | 1000 | 12 | 3′ spacer 16 | 2370 | 12 | ++++ | + | + | + |
| 5′ spacer 16 | 1000 | 12 | 3′ spacer 12 | 2297 | 10 | +++ | + | + | + |
| 5′ spacer 16 | 1000 | 12 | 3′ spacer 12 | 2298 | 12 | +++ | + | + | + |
| 5′ spacer 16 | 1000 | 12 | 3′ spacer 17 | 2689 | 10 | ++++ | + | + | ++ |
| 5′ spacer 16 | 1000 | 12 | 3′ spacer 17 | 2690 | 12 | ++++ | + | + | ++ |
| 5′ spacer 16 | 1000 | 12 | 3′ spacer 5 | 1543 | 12 | ++++ | + | + | +++ |
| 5′ spacer 16 | 1000 | 12 | 3′ spacer 13 | 2315 | 10 | ++++ | + | + | +++ |
| 5′ spacer 16 | 1000 | 12 | 3′ spacer 13 | 2316 | 12 | ++++ | + | + | +++ |
| 5′ spacer 16 | 1000 | 12 | 3′ spacer 14 | 2333 | 10 | ++++ | + | + | +++ |
| 5′ spacer 16 | 1000 | 12 | 3′ spacer 14 | 2334 | 12 | ++++ | + | + | +++ |
| 5′ spacer 16 | 1000 | 12 | 3′ spacer 6 | 1880 | 11 | ++++ | + | + | + |
| 5′ spacer 16 | 1000 | 12 | 3′ spacer 6 | 1881 | 13 | ++++ | + | + | + |
| 5′ spacer 16 | 1000 | 12 | 3′ spacer 15 | 2351 | 10 | +++ | + | + | + |
| 5′ spacer 16 | 1000 | 12 | 3′ spacer 15 | 2352 | 12 | +++ | + | + | + |
| 5′ spacer 16 | 1000 | 12 | 3′ spacer 7 | 1898 | 11 | ++++ | + | + | + |
| 5′ spacer 16 | 1000 | 12 | 3′ spacer 7 | 1899 | 13 | +++ | + | + | + |
| 5′ spacer 16 | 1000 | 12 | 3′ spacer 2 | 1399 | 12 | +++ | + | + | + |
| 5′ spacer 17 | 1017 | 10 | 3′ spacer 8 | 1916 | 10 | ++++ | + | + | + |
| 5′ spacer 17 | 1017 | 10 | 3′ spacer 9 | 1934 | 10 | +++ | + | + | + |
| 5′ spacer 17 | 1017 | 10 | 3′ spacer 9 | 1935 | 12 | ++ | + | + | + |
| 5′ spacer 17 | 1017 | 10 | 3′ spacer 10 | 1952 | 10 | ++++ | + | + | + |
| 5′ spacer 17 | 1017 | 10 | 3′ spacer 10 | 1953 | 12 | ++++ | + | + | + |
| 5′ spacer 17 | 1017 | 10 | 3′ spacer 11 | 2279 | 10 | +++ | + | + | + |
| 5′ spacer 17 | 1017 | 10 | 3′ spacer 11 | 2280 | 12 | +++ | + | + | + |
| 5′ spacer 17 | 1017 | 10 | 3′ spacer 16 | 2369 | 10 | ++++ | + | + | + |
| 5′ spacer 17 | 1017 | 10 | 3′ spacer 16 | 2370 | 12 | +++ | + | + | + |
| 5′ spacer 17 | 1017 | 10 | 3′ spacer 12 | 2297 | 10 | +++ | + | + | + |
| 5′ spacer 17 | 1017 | 10 | 3′ spacer 12 | 2298 | 12 | +++ | + | + | ++ |
| 5′ spacer 17 | 1017 | 10 | 3′ spacer 17 | 2689 | 10 | ++++ | + | + | + |
| 5′ spacer 17 | 1017 | 10 | 3′ spacer 17 | 2690 | 12 | ++++ | + | + | + |
| 5′ spacer 17 | 1017 | 10 | 3′ spacer 5 | 1543 | 12 | ++++ | + | + | +++ |
| 5′ spacer 17 | 1017 | 10 | 3′ spacer 13 | 2315 | 10 | ++++ | + | + | +++ |
| 5′ spacer 17 | 1017 | 10 | 3′ spacer 13 | 2316 | 12 | ++++ | + | + | ++++ |
| 5′ spacer 17 | 1017 | 10 | 3′ spacer 14 | 2333 | 10 | ++++ | + | + | ++++ |
| 5′ spacer 17 | 1017 | 10 | 3′ spacer 14 | 2334 | 12 | ++++ | + | + | ++++ |
| 5′ spacer 17 | 1017 | 10 | 3′ spacer 6 | 1880 | 11 | +++ | + | + | + |
| 5′ spacer 17 | 1017 | 10 | 3′ spacer 6 | 1881 | 13 | ++ | + | + | + |
| 5′ spacer 17 | 1017 | 10 | 3′ spacer 15 | 2351 | 10 | +++ | + | + | + |
| 5′ spacer 17 | 1017 | 10 | 3′ spacer 15 | 2352 | 12 | +++ | + | + | + |
| 5′ spacer 17 | 1017 | 10 | 3′ spacer 7 | 1898 | 11 | ++ | + | + | + |
| 5′ spacer 17 | 1017 | 10 | 3′ spacer 7 | 1899 | 13 | +++ | + | + | + |
| 5′ spacer 17 | 1017 | 10 | 3′ spacer 2 | 1399 | 12 | +++ | + | + | + |
| 5′ spacer 17 | 1018 | 12 | 3′ spacer 8 | 1916 | 10 | +++ | + | + | + |
| 5′ spacer 17 | 1018 | 12 | 3′ spacer 9 | 1934 | 10 | +++ | + | + | + |
| 5′ spacer 17 | 1018 | 12 | 3′ spacer 9 | 1935 | 12 | +++ | + | + | + |
| 5′ spacer 17 | 1018 | 12 | 3′ spacer 10 | 1952 | 10 | ++++ | + | + | + |
| 5′ spacer 17 | 1018 | 12 | 3′ spacer 10 | 1953 | 12 | ++++ | + | + | + |
| 5′ spacer 17 | 1018 | 12 | 3′ spacer 11 | 2279 | 10 | +++ | + | + | + |
| 5′ spacer 17 | 1018 | 12 | 3′ spacer 11 | 2280 | 12 | +++ | + | + | + |
| 5′ spacer 17 | 1018 | 12 | 3′ spacer 16 | 2369 | 10 | +++ | + | + | + |
| 5′ spacer 17 | 1018 | 12 | 3′ spacer 16 | 2370 | 12 | +++ | + | + | + |
| 5′ spacer 17 | 1018 | 12 | 3′ spacer 12 | 2297 | 10 | ++ | + | + | + |
| 5′ spacer 17 | 1018 | 12 | 3′ spacer 12 | 2298 | 12 | ++++ | + | + | ++ |
| 5′ spacer 17 | 1018 | 12 | 3′ spacer 17 | 2689 | 10 | ++++ | + | + | + |
| 5′ spacer 17 | 1018 | 12 | 3′ spacer 17 | 2690 | 12 | ++++ | + | + | + |
| 5′ spacer 17 | 1018 | 12 | 3′ spacer 5 | 1543 | 12 | ++++ | + | + | +++ |
| 5′ spacer 17 | 1018 | 12 | 3′ spacer 13 | 2315 | 10 | ++++ | + | + | +++ |
| 5′ spacer 17 | 1018 | 12 | 3′ spacer 13 | 2316 | 12 | ++++ | + | + | ++++ |
| 5′ spacer 17 | 1018 | 12 | 3′ spacer 14 | 2333 | 10 | ++ | + | + | ++++ |
| 5′ spacer 17 | 1018 | 12 | 3′ spacer 14 | 2334 | 12 | ++ | + | + | ++++ |
| 5′ spacer 17 | 1018 | 12 | 3′ spacer 6 | 1880 | 11 | +++ | + | + | + |
| 5′ spacer 17 | 1018 | 12 | 3′ spacer 6 | 1881 | 13 | +++ | + | + | + |
| 5′ spacer 17 | 1018 | 12 | 3′ spacer 15 | 2351 | 10 | ++ | + | + | + |
| 5′ spacer 17 | 1018 | 12 | 3′ spacer 15 | 2352 | 12 | +++ | + | + | + |
| 5′ spacer 17 | 1018 | 12 | 3′ spacer 7 | 1898 | 11 | +++ | + | + | + |
| 5′ spacer 17 | 1018 | 12 | 3′ spacer 7 | 1899 | 13 | ++ | + | + | + |
| 5′ spacer 17 | 1018 | 12 | 3′ spacer 2 | 1399 | 12 | +++ | + | + | + |
| 5′ spacer 18 | 1035 | 10 | 3′ spacer 8 | 1916 | 10 | ++++ | + | + | + |
| 5′ spacer 18 | 1035 | 10 | 3′ spacer 9 | 1934 | 10 | ++ | + | + | + |
| 5′ spacer 18 | 1035 | 10 | 3′ spacer 9 | 1935 | 12 | + | + | + | + |
| 5′ spacer 18 | 1035 | 10 | 3′ spacer 10 | 1952 | 10 | ++++ | + | + | + |
| 5′ spacer 18 | 1035 | 10 | 3′ spacer 10 | 1953 | 12 | ++++ | + | + | + |
| 5′ spacer 18 | 1035 | 10 | 3′ spacer 11 | 2279 | 10 | +++ | + | + | + |
| 5′ spacer 18 | 1035 | 10 | 3′ spacer 11 | 2280 | 12 | +++ | + | + | + |
| 5′ spacer 18 | 1035 | 10 | 3′ spacer 16 | 2369 | 10 | +++ | + | + | + |
| 5′ spacer 18 | 1035 | 10 | 3′ spacer 16 | 2370 | 12 | +++ | + | + | + |
| 5′ spacer 18 | 1035 | 10 | 3′ spacer 12 | 2297 | 10 | ++++ | + | + | + |
| 5′ spacer 18 | 1035 | 10 | 3′ spacer 12 | 2298 | 12 | +++ | + | + | + |
| 5′ spacer 18 | 1035 | 10 | 3′ spacer 17 | 2689 | 10 | ++++ | + | + | ++ |
| 5′ spacer 18 | 1035 | 10 | 3′ spacer 17 | 2690 | 12 | ++++ | + | + | ++ |
| 5′ spacer 18 | 1035 | 10 | 3′ spacer 5 | 1543 | 12 | ++++ | + | + | +++ |
| 5′ spacer 18 | 1035 | 10 | 3′ spacer 13 | 2315 | 10 | ++++ | + | + | ++++ |
| 5′ spacer 18 | 1035 | 10 | 3′ spacer 13 | 2316 | 12 | ++++ | + | + | ++++ |
| 5′ spacer 18 | 1035 | 10 | 3′ spacer 14 | 2333 | 10 | ++++ | + | + | ++++ |
| 5′ spacer 18 | 1035 | 10 | 3′ spacer 14 | 2334 | 12 | ++++ | + | + | ++++ |
| 5′ spacer 18 | 1035 | 10 | 3′ spacer 6 | 1880 | 11 | ++ | + | + | + |
| 5′ spacer 18 | 1035 | 10 | 3′ spacer 6 | 1881 | 13 | + | + | + | + |
| 5′ spacer 18 | 1035 | 10 | 3′ spacer 15 | 2351 | 10 | +++ | + | + | + |
| 5′ spacer 18 | 1035 | 10 | 3′ spacer 15 | 2352 | 12 | +++ | + | + | + |
| 5′ spacer 18 | 1035 | 10 | 3′ spacer 7 | 1898 | 11 | + | + | + | + |
| 5′ spacer 18 | 1035 | 10 | 3′ spacer 7 | 1899 | 13 | ++ | + | + | + |
| 5′ spacer 18 | 1035 | 10 | 3′ spacer 2 | 1399 | 12 | +++ | + | + | + |
| 5′ spacer 18 | 1036 | 12 | 3′ spacer 8 | 1916 | 10 | ++++ | + | + | + |
| 5′ spacer 18 | 1036 | 12 | 3′ spacer 9 | 1934 | 10 | + | + | + | + |
| 5′ spacer 18 | 1036 | 12 | 3′ spacer 9 | 1935 | 12 | + | + | + | + |
| 5′ spacer 18 | 1036 | 12 | 3′ spacer 10 | 1952 | 10 | ++++ | + | + | + |
| 5′ spacer 18 | 1036 | 12 | 3′ spacer 10 | 1953 | 12 | ++++ | + | + | + |
| 5′ spacer 18 | 1036 | 12 | 3′ spacer 11 | 2279 | 10 | ++++ | + | + | + |
| 5′ spacer 18 | 1036 | 12 | 3′ spacer 11 | 2280 | 12 | +++ | + | + | + |
| 5′ spacer 18 | 1036 | 12 | 3′ spacer 16 | 2369 | 10 | +++ | + | + | + |
| 5′ spacer 18 | 1036 | 12 | 3′ spacer 16 | 2370 | 12 | +++ | + | + | + |
| 5′ spacer 18 | 1036 | 12 | 3′ spacer 12 | 2297 | 10 | +++ | + | + | + |
| 5′ spacer 18 | 1036 | 12 | 3′ spacer 12 | 2298 | 12 | +++ | + | + | ++ |
| 5′ spacer 18 | 1036 | 12 | 3′ spacer 17 | 2689 | 10 | ++++ | + | + | ++ |
| 5′ spacer 18 | 1036 | 12 | 3′ spacer 17 | 2690 | 12 | ++++ | + | + | ++ |
| 5′ spacer 18 | 1036 | 12 | 3′ spacer 5 | 1543 | 12 | ++++ | + | + | +++ |
| 5′ spacer 18 | 1036 | 12 | 3′ spacer 13 | 2315 | 10 | ++++ | + | + | ++++ |
| 5′ spacer 18 | 1036 | 12 | 3′ spacer 13 | 2316 | 12 | ++++ | + | + | ++++ |
| 5′ spacer 18 | 1036 | 12 | 3′ spacer 14 | 2333 | 10 | ++++ | + | + | ++++ |
| 5′ spacer 18 | 1036 | 12 | 3′ spacer 14 | 2334 | 12 | ++++ | + | + | ++++ |
| 5′ spacer 18 | 1036 | 12 | 3′ spacer 6 | 1880 | 11 | ++ | + | + | + |
| 5′ spacer 18 | 1036 | 12 | 3′ spacer 6 | 1881 | 13 | + | + | + | + |
| 5′ spacer 18 | 1036 | 12 | 3′ spacer 15 | 2351 | 10 | +++ | + | + | + |
| 5′ spacer 18 | 1036 | 12 | 3′ spacer 15 | 2352 | 12 | +++ | + | + | + |
| 5′ spacer 18 | 1036 | 12 | 3′ spacer 7 | 1898 | 11 | + | + | + | + |
| 5′ spacer 18 | 1036 | 12 | 3′ spacer 7 | 1899 | 13 | + | + | + | + |
| 5′ spacer 18 | 1036 | 12 | 3′ spacer 2 | 1399 | 12 | +++ | + | + | + |
| 5′ spacer 19 | 1357 | 10 | 3′ spacer 8 | 1916 | 10 | +++ | + | + | + |
| 5′ spacer 19 | 1357 | 10 | 3′ spacer 9 | 1934 | 10 | + | + | + | + |
| 5′ spacer 19 | 1357 | 10 | 3′ spacer 9 | 1935 | 12 | + | + | + | + |
| 5′ spacer 19 | 1357 | 10 | 3′ spacer 10 | 1952 | 10 | ++++ | + | + | + |
| 5′ spacer 19 | 1357 | 10 | 3′ spacer 10 | 1953 | 12 | ++++ | + | + | + |
| 5′ spacer 19 | 1357 | 10 | 3′ spacer 11 | 2279 | 10 | +++ | + | + | + |
| 5′ spacer 19 | 1357 | 10 | 3′ spacer 11 | 2280 | 12 | +++ | + | + | + |
| 5′ spacer 19 | 1357 | 10 | 3′ spacer 16 | 2369 | 10 | +++ | + | + | + |
| 5′ spacer 19 | 1357 | 10 | 3′ spacer 16 | 2370 | 12 | +++ | + | + | + |
| 5′ spacer 19 | 1357 | 10 | 3′ spacer 12 | 2297 | 10 | +++ | + | + | + |
| 5′ spacer 19 | 1357 | 10 | 3′ spacer 12 | 2298 | 12 | ++ | + | + | + |
| 5′ spacer 19 | 1357 | 10 | 3′ spacer 17 | 2689 | 10 | ++++ | + | + | + |
| 5′ spacer 19 | 1357 | 10 | 3′ spacer 17 | 2690 | 12 | ++++ | + | + | + |
| 5′ spacer 19 | 1357 | 10 | 3′ spacer 5 | 1543 | 12 | ++++ | + | + | + |
| 5′ spacer 19 | 1357 | 10 | 3′ spacer 13 | 2315 | 10 | +++ | + | + | ++ |
| 5′ spacer 19 | 1357 | 10 | 3′ spacer 13 | 2316 | 12 | +++ | + | + | ++ |
| 5′ spacer 19 | 1357 | 10 | 3′ spacer 14 | 2333 | 10 | +++ | + | + | +++ |
| 5′ spacer 19 | 1357 | 10 | 3′ spacer 14 | 2334 | 12 | +++ | + | + | ++ |
| 5′ spacer 19 | 1357 | 10 | 3′ spacer 6 | 1880 | 11 | + | + | + | + |
| 5′ spacer 19 | 1357 | 10 | 3′ spacer 6 | 1881 | 13 | + | + | + | + |
| 5′ spacer 19 | 1357 | 10 | 3′ spacer 15 | 2351 | 10 | +++ | + | + | + |
| 5′ spacer 19 | 1357 | 10 | 3′ spacer 15 | 2352 | 12 | +++ | + | + | + |
| 5′ spacer 19 | 1357 | 10 | 3′ spacer 7 | 1898 | 11 | + | + | + | + |
| 5′ spacer 19 | 1357 | 10 | 3′ spacer 7 | 1899 | 13 | + | + | + | + |
| 5′ spacer 19 | 1357 | 10 | 3′ spacer 2 | 1399 | 12 | ++ | + | + | + |
| 5′ spacer 19 | 1358 | 13 | 3′ spacer 8 | 1916 | 10 | +++ | + | + | + |
| 5′ spacer 19 | 1358 | 13 | 3′ spacer 9 | 1934 | 10 | + | + | + | + |
| 5′ spacer 19 | 1358 | 13 | 3′ spacer 9 | 1935 | 12 | + | + | + | + |
| 5′ spacer 19 | 1358 | 13 | 3′ spacer 10 | 1952 | 10 | +++ | + | + | + |
| 5′ spacer 19 | 1358 | 13 | 3′ spacer 10 | 1953 | 12 | ++++ | + | + | + |
| 5′ spacer 19 | 1358 | 13 | 3′ spacer 11 | 2279 | 10 | +++ | + | + | + |
| 5′ spacer 19 | 1358 | 13 | 3′ spacer 11 | 2280 | 12 | +++ | + | + | + |
| 5′ spacer 19 | 1358 | 13 | 3′ spacer 16 | 2369 | 10 | +++ | + | + | + |
| 5′ spacer 19 | 1358 | 13 | 3′ spacer 16 | 2370 | 12 | +++ | + | + | + |
| 5′ spacer 19 | 1358 | 13 | 3′ spacer 12 | 2297 | 10 | +++ | + | + | + |
| 5′ spacer 19 | 1358 | 13 | 3′ spacer 12 | 2298 | 12 | ++ | + | + | + |
| 5′ spacer 19 | 1358 | 13 | 3′ spacer 17 | 2689 | 10 | ++++ | + | + | + |
| 5′ spacer 19 | 1358 | 13 | 3′ spacer 17 | 2690 | 12 | ++++ | + | + | + |
| 5′ spacer 19 | 1358 | 13 | 3′ spacer 5 | 1543 | 12 | ++++ | + | + | + |
| 5′ spacer 19 | 1358 | 13 | 3′ spacer 13 | 2315 | 10 | +++ | + | + | +++ |
| 5′ spacer 19 | 1358 | 13 | 3′ spacer 13 | 2316 | 12 | +++ | + | + | ++ |
| 5′ spacer 19 | 1358 | 13 | 3′ spacer 14 | 2333 | 10 | ++++ | + | + | +++ |
| 5′ spacer 19 | 1358 | 13 | 3′ spacer 14 | 2334 | 12 | +++ | + | + | +++ |
| 5′ spacer 19 | 1358 | 13 | 3′ spacer 6 | 1880 | 11 | + | + | + | + |
| 5′ spacer 19 | 1358 | 13 | 3′ spacer 6 | 1881 | 13 | + | + | + | + |
| 5′ spacer 19 | 1358 | 13 | 3′ spacer 15 | 2351 | 10 | +++ | + | + | + |
| 5′ spacer 19 | 1358 | 13 | 3′ spacer 15 | 2352 | 12 | +++ | + | + | + |
| 5′ spacer 19 | 1358 | 13 | 3′ spacer 7 | 1898 | 11 | + | + | + | + |
| 5′ spacer 19 | 1358 | 13 | 3′ spacer 7 | 1899 | 13 | + | + | + | + |
| 5′ spacer 19 | 1358 | 13 | 3′ spacer 2 | 1399 | 12 | ++ | + | + | + |
| 5′ spacer 3 | 56 | 10 | 3′ spacer 8 | 1916 | 10 | ++ | + | + | + |
| 5′ spacer 3 | 56 | 10 | 3′ spacer 9 | 1934 | 10 | + | + | + | + |
| 5′ spacer 3 | 56 | 10 | 3′ spacer 9 | 1935 | 12 | +++ | + | + | + |
| 5′ spacer 3 | 56 | 10 | 3′ spacer 11 | 2279 | 10 | + | + | + | + |
| 5′ spacer 3 | 56 | 10 | 3′ spacer 11 | 2280 | 12 | + | + | + | + |
| 5′ spacer 3 | 56 | 10 | 3′ spacer 16 | 2369 | 10 | + | + | + | + |
| 5′ spacer 3 | 56 | 10 | 3′ spacer 12 | 2297 | 10 | ++ | NA | + | + |
| 5′ spacer 3 | 56 | 10 | 3′ spacer 17 | 2689 | 10 | + | NA | NA | + |
| 5′ spacer 3 | 56 | 10 | 3′ spacer 17 | 2690 | 12 | ++ | + | + | ++ |
| 5′ spacer 3 | 56 | 10 | 3′ spacer 5 | 1543 | 12 | ++ | + | + | ++ |
| 5′ spacer 3 | 56 | 10 | 3′ spacer 13 | 2315 | 10 | + | + | + | ++ |
| 5′ spacer 3 | 56 | 10 | 3′ spacer 13 | 2316 | 12 | + | + | + | ++ |
| 5′ spacer 3 | 56 | 10 | 3′ spacer 14 | 2333 | 10 | ++++ | + | + | +++ |
| 5′ spacer 3 | 56 | 10 | 3′ spacer 14 | 2334 | 12 | ++ | + | + | ++ |
| 5′ spacer 3 | 56 | 10 | 3′ spacer 6 | 1880 | 11 | + | + | + | + |
| 5′ spacer 3 | 56 | 10 | 3′ spacer 6 | 1881 | 13 | + | + | + | + |
| 5′ spacer 3 | 56 | 10 | 3′ spacer 15 | 2352 | 12 | + | + | + | + |
| 5′ spacer 3 | 56 | 10 | 3′ spacer 7 | 1898 | 11 | + | + | + | + |
| 5′ spacer 3 | 56 | 10 | 3′ spacer 7 | 1899 | 13 | + | + | + | + |
| 5′ spacer 3 | 56 | 10 | 3′ spacer 2 | 1399 | 12 | + | + | + | + |
| 5′ spacer 3 | 57 | 12 | 3′ spacer 8 | 1916 | 10 | + | + | + | + |
| 5′ spacer 3 | 57 | 12 | 3′ spacer 9 | 1934 | 10 | + | + | + | + |
| 5′ spacer 3 | 57 | 12 | 3′ spacer 9 | 1935 | 12 | ++ | + | + | + |
| 5′ spacer 3 | 57 | 12 | 3′ spacer 11 | 2279 | 10 | + | + | + | + |
| 5′ spacer 3 | 57 | 12 | 3′ spacer 16 | 2369 | 10 | ++ | + | + | + |
| 5′ spacer 3 | 57 | 12 | 3′ spacer 12 | 2297 | 10 | + | NA | NA | + |
| 5′ spacer 3 | 57 | 12 | 3′ spacer 17 | 2689 | 10 | + | + | NA | + |
| 5′ spacer 3 | 57 | 12 | 3′ spacer 17 | 2690 | 12 | + | NA | + | + |
| 5′ spacer 3 | 57 | 12 | 3′ spacer 5 | 1543 | 12 | ++ | + | + | +++ |
| 5′ spacer 3 | 57 | 12 | 3′ spacer 13 | 2315 | 10 | + | + | NA | ++ |
| 5′ spacer 3 | 57 | 12 | 3′ spacer 13 | 2316 | 12 | + | + | + | ++ |
| 5′ spacer 3 | 57 | 12 | 3′ spacer 14 | 2333 | 10 | ++++ | + | + | +++ |
| 5′ spacer 3 | 57 | 12 | 3′ spacer 14 | 2334 | 12 | +++ | + | + | ++ |
| 5′ spacer 3 | 57 | 12 | 3′ spacer 6 | 1880 | 11 | + | + | + | + |
| 5′ spacer 3 | 57 | 12 | 3′ spacer 6 | 1881 | 13 | + | + | + | + |
| 5′ spacer 3 | 57 | 12 | 3′ spacer 15 | 2352 | 12 | + | + | + | + |
| 5′ spacer 3 | 57 | 12 | 3′ spacer 7 | 1898 | 11 | + | + | + | + |
| 5′ spacer 3 | 57 | 12 | 3′ spacer 7 | 1899 | 13 | + | + | + | + |
| 5′ spacer 3 | 57 | 12 | 3′ spacer 2 | 1399 | 12 | + | + | + | + |
| 5′ spacer 7 | 534 | 10 | 3′ spacer 8 | 1916 | 10 | ++++ | + | + | ++ |
| 5′ spacer 7 | 534 | 10 | 3′ spacer 9 | 1934 | 10 | ++++ | + | + | ++ |
| 5′ spacer 7 | 534 | 10 | 3′ spacer 10 | 1952 | 10 | ++++ | + | + | ++ |
| 5′ spacer 7 | 534 | 10 | 3′ spacer 10 | 1953 | 12 | ++++ | + | + | ++ |
| 5′ spacer 7 | 534 | 10 | 3′ spacer 11 | 2279 | 10 | ++++ | + | + | ++ |
| 5′ spacer 7 | 534 | 10 | 3′ spacer 11 | 2280 | 12 | ++++ | + | + | ++ |
| 5′ spacer 7 | 534 | 10 | 3′ spacer 12 | 2297 | 10 | ++++ | + | NA | + |
| 5′ spacer 7 | 534 | 10 | 3′ spacer 12 | 2298 | 12 | ++++ | + | NA | + |
| 5′ spacer 7 | 534 | 10 | 3′ spacer 17 | 2689 | 10 | ++++ | + | NA | ++ |
| 5′ spacer 7 | 534 | 10 | 3′ spacer 17 | 2690 | 12 | ++++ | + | NA | ++ |
| 5′ spacer 7 | 534 | 10 | 3′ spacer 5 | 1543 | 12 | ++++ | + | NA | + |
| 5′ spacer 7 | 534 | 10 | 3′ spacer 6 | 1880 | 11 | ++++ | + | + | + |
| 5′ spacer 7 | 534 | 10 | 3′ spacer 6 | 1881 | 13 | ++++ | + | + | + |
| 5′ spacer 7 | 534 | 10 | 3′ spacer 15 | 2352 | 12 | ++++ | + | + | + |
| 5′ spacer 7 | 534 | 10 | 3′ spacer 7 | 1898 | 11 | ++++ | + | + | +++ |
| 5′ spacer 7 | 534 | 10 | 3′ spacer 7 | 1899 | 13 | ++++ | + | + | +++ |
| 5′ spacer 7 | 534 | 10 | 3′ spacer 2 | 1399 | 12 | ++++ | + | + | +++ |
| 5′ spacer 7 | 535 | 12 | 3′ spacer 8 | 1916 | 10 | ++++ | + | + | ++ |
| 5′ spacer 7 | 535 | 12 | 3′ spacer 9 | 1934 | 10 | ++++ | + | + | ++ |
| 5′ spacer 7 | 535 | 12 | 3′ spacer 9 | 1935 | 12 | ++++ | + | + | ++ |
| 5′ spacer 7 | 535 | 12 | 3′ spacer 10 | 1952 | 10 | ++++ | + | + | ++ |
| 5′ spacer 7 | 535 | 12 | 3′ spacer 10 | 1953 | 12 | ++++ | + | + | ++ |
| 5′ spacer 7 | 535 | 12 | 3′ spacer 11 | 2279 | 10 | +++ | + | + | ++ |
| 5′ spacer 7 | 535 | 12 | 3′ spacer 11 | 2280 | 12 | ++++ | + | + | ++ |
| 5′ spacer 7 | 535 | 12 | 3′ spacer 16 | 2369 | 10 | ++++ | + | NA | +++ |
| 5′ spacer 7 | 535 | 12 | 3′ spacer 12 | 2297 | 10 | ++++ | + | NA | + |
| 5′ spacer 7 | 535 | 12 | 3′ spacer 12 | 2298 | 12 | ++++ | + | NA | + |
| 5′ spacer 7 | 535 | 12 | 3′ spacer 17 | 2689 | 10 | ++++ | + | NA | ++ |
| 5′ spacer 7 | 535 | 12 | 3′ spacer 17 | 2690 | 12 | ++++ | + | NA | ++ |
| 5′ spacer 7 | 535 | 12 | 3′ spacer 5 | 1543 | 12 | ++++ | + | NA | + |
| 5′ spacer 7 | 535 | 12 | 3′ spacer 6 | 1880 | 11 | ++++ | + | + | + |
| 5′ spacer 7 | 535 | 12 | 3′ spacer 6 | 1881 | 13 | ++++ | + | + | + |
| 5′ spacer 7 | 535 | 12 | 3′ spacer 15 | 2352 | 12 | ++++ | + | + | + |
| 5′ spacer 7 | 535 | 12 | 3′ spacer 7 | 1898 | 11 | ++++ | + | + | +++ |
| 5′ spacer 7 | 535 | 12 | 3′ spacer 7 | 1899 | 13 | ++++ | + | + | +++ |
| 5′ spacer 7 | 535 | 12 | 3′ spacer 2 | 1399 | 12 | ++++ | + | + | +++ |
| 5′ spacer 8 | 552 | 10 | 3′ spacer 8 | 1916 | 10 | ++++ | + | + | ++ |
| 5′ spacer 8 | 552 | 10 | 3′ spacer 9 | 1934 | 10 | ++++ | + | + | ++ |
| 5′ spacer 8 | 552 | 10 | 3′ spacer 9 | 1935 | 12 | ++++ | + | + | ++ |
| 5′ spacer 8 | 552 | 10 | 3′ spacer 10 | 1952 | 10 | ++++ | + | + | +++ |
| 5′ spacer 8 | 552 | 10 | 3′ spacer 10 | 1953 | 12 | ++++ | + | + | +++ |
| 5′ spacer 8 | 552 | 10 | 3′ spacer 11 | 2279 | 10 | ++++ | + | + | ++ |
| 5′ spacer 8 | 552 | 10 | 3′ spacer 11 | 2280 | 12 | ++++ | + | + | ++ |
| 5′ spacer 8 | 552 | 10 | 3′ spacer 16 | 2369 | 10 | ++++ | + | + | ++ |
| 5′ spacer 8 | 552 | 10 | 3′ spacer 12 | 2297 | 10 | ++++ | + | NA | ++ |
| 5′ spacer 8 | 552 | 10 | 3′ spacer 12 | 2298 | 12 | ++++ | + | NA | ++ |
| 5′ spacer 8 | 552 | 10 | 3′ spacer 17 | 2689 | 10 | ++++ | + | NA | ++ |
| 5′ spacer 8 | 552 | 10 | 3′ spacer 17 | 2690 | 12 | ++++ | + | NA | ++ |
| 5′ spacer 8 | 552 | 10 | 3′ spacer 5 | 1543 | 12 | ++++ | + | NA | ++ |
| 5′ spacer 8 | 552 | 10 | 3′ spacer 13 | 2315 | 10 | +++ | + | NA | + |
| 5′ spacer 8 | 552 | 10 | 3′ spacer 13 | 2316 | 12 | ++++ | + | NA | + |
| 5′ spacer 8 | 552 | 10 | 3′ spacer 14 | 2333 | 10 | ++++ | + | NA | + |
| 5′ spacer 8 | 552 | 10 | 3′ spacer 14 | 2334 | 12 | ++++ | + | NA | + |
| 5′ spacer 8 | 552 | 10 | 3′ spacer 6 | 1880 | 11 | ++++ | + | + | + |
| 5′ spacer 8 | 552 | 10 | 3′ spacer 6 | 1881 | 13 | ++++ | + | + | + |
| 5′ spacer 8 | 552 | 10 | 3′ spacer 15 | 2352 | 12 | ++++ | + | + | + |
| 5′ spacer 8 | 552 | 10 | 3′ spacer 7 | 1898 | 11 | ++++ | + | + | ++ |
| 5′ spacer 8 | 552 | 10 | 3′ spacer 7 | 1899 | 13 | ++++ | + | + | ++ |
| 5′ spacer 8 | 552 | 10 | 3′ spacer 2 | 1399 | 12 | ++++ | + | + | ++ |
| 5′ spacer 8 | 553 | 13 | 3′ spacer 8 | 1916 | 10 | ++++ | + | + | ++ |
| 5′ spacer 8 | 553 | 13 | 3′ spacer 9 | 1934 | 10 | ++++ | + | + | ++ |
| 5′ spacer 8 | 553 | 13 | 3′ spacer 9 | 1935 | 12 | ++++ | + | + | ++ |
| 5′ spacer 8 | 553 | 13 | 3′ spacer 10 | 1952 | 10 | ++++ | + | + | +++ |
| 5′ spacer 8 | 553 | 13 | 3′ spacer 10 | 1953 | 12 | ++++ | + | + | +++ |
| 5′ spacer 8 | 553 | 13 | 3′ spacer 11 | 2279 | 10 | +++ | + | + | ++ |
| 5′ spacer 8 | 553 | 13 | 3′ spacer 11 | 2280 | 12 | ++++ | + | + | ++ |
| 5′ spacer 8 | 553 | 13 | 3′ spacer 16 | 2369 | 10 | ++++ | + | + | ++ |
| 5′ spacer 8 | 553 | 13 | 3′ spacer 12 | 2297 | 10 | +++ | + | NA | +++ |
| 5′ spacer 8 | 553 | 13 | 3′ spacer 12 | 2298 | 12 | ++++ | + | NA | ++ |
| 5′ spacer 8 | 553 | 13 | 3′ spacer 17 | 2689 | 10 | ++++ | + | NA | ++ |
| 5′ spacer 8 | 553 | 13 | 3′ spacer 17 | 2690 | 12 | ++++ | + | NA | ++ |
| 5′ spacer 8 | 553 | 13 | 3′ spacer 5 | 1543 | 12 | ++++ | + | NA | ++ |
| 5′ spacer 8 | 553 | 13 | 3′ spacer 13 | 2315 | 10 | ++++ | + | NA | ++ |
| 5′ spacer 8 | 553 | 13 | 3′ spacer 13 | 2316 | 12 | +++ | + | NA | + |
| 5′ spacer 8 | 553 | 13 | 3′ spacer 14 | 2333 | 10 | ++++ | + | NA | + |
| 5′ spacer 8 | 553 | 13 | 3′ spacer 14 | 2334 | 12 | ++++ | + | NA | + |
| 5′ spacer 8 | 553 | 13 | 3′ spacer 6 | 1880 | 11 | ++++ | + | + | + |
| 5′ spacer 8 | 553 | 13 | 3′ spacer 6 | 1881 | 13 | ++++ | + | + | + |
| 5′ spacer 8 | 553 | 13 | 3′ spacer 15 | 2352 | 12 | ++++ | + | + | + |
| 5′ spacer 8 | 553 | 13 | 3′ spacer 7 | 1898 | 11 | ++++ | + | + | ++ |
| 5′ spacer 8 | 553 | 13 | 3′ spacer 7 | 1899 | 13 | ++++ | + | + | ++ |
| 5′ spacer 8 | 553 | 13 | 3′ spacer 2 | 1399 | 12 | ++++ | + | + | ++ |
| 5′ spacer 9 | 570 | 10 | 3′ spacer 8 | 1916 | 10 | ++++ | + | + | ++ |
| 5′ spacer 9 | 570 | 10 | 3′ spacer 9 | 1934 | 10 | ++++ | + | + | ++ |
| 5′ spacer 9 | 570 | 10 | 3′ spacer 9 | 1935 | 12 | ++++ | + | + | ++ |
| 5′ spacer 9 | 570 | 10 | 3′ spacer 10 | 1952 | 10 | ++ | NA | + | ++ |
| 5′ spacer 9 | 570 | 10 | 3′ spacer 10 | 1953 | 12 | ++ | + | + | +++ |
| 5′ spacer 9 | 570 | 10 | 3′ spacer 11 | 2279 | 10 | + | + | + | ++ |
| 5′ spacer 9 | 570 | 10 | 3′ spacer 11 | 2280 | 12 | ++ | + | + | ++ |
| 5′ spacer 9 | 570 | 10 | 3′ spacer 16 | 2369 | 10 | ++++ | + | + | ++ |
| 5′ spacer 9 | 570 | 10 | 3′ spacer 12 | 2297 | 10 | +++ | + | NA | ++ |
| 5′ spacer 9 | 570 | 10 | 3′ spacer 12 | 2298 | 12 | ++++ | + | NA | + |
| 5′ spacer 9 | 570 | 10 | 3′ spacer 17 | 2689 | 10 | ++++ | + | NA | ++ |
| 5′ spacer 9 | 570 | 10 | 3′ spacer 17 | 2690 | 12 | ++++ | + | NA | ++ |
| 5′ spacer 9 | 570 | 10 | 3′ spacer 5 | 1543 | 12 | ++++ | + | NA | ++ |
| 5′ spacer 9 | 570 | 10 | 3′ spacer 13 | 2315 | 10 | ++ | + | NA | + |
| 5′ spacer 9 | 570 | 10 | 3′ spacer 13 | 2316 | 12 | ++ | + | NA | + |
| 5′ spacer 9 | 570 | 10 | 3′ spacer 14 | 2333 | 10 | ++++ | + | NA | + |
| 5′ spacer 9 | 570 | 10 | 3′ spacer 14 | 2334 | 12 | +++ | + | NA | + |
| 5′ spacer 9 | 570 | 10 | 3′ spacer 6 | 1880 | 11 | ++++ | + | + | + |
| 5′ spacer 9 | 570 | 10 | 3′ spacer 6 | 1881 | 13 | ++++ | + | + | + |
| 5′ spacer 9 | 570 | 10 | 3′ spacer 15 | 2352 | 12 | +++ | + | + | + |
| 5′ spacer 9 | 570 | 10 | 3′ spacer 7 | 1898 | 11 | ++++ | + | + | + |
| 5′ spacer 9 | 570 | 10 | 3′ spacer 7 | 1899 | 13 | ++++ | + | + | + |
| 5′ spacer 9 | 570 | 10 | 3′ spacer 2 | 1399 | 12 | +++ | + | + | + |
| 5′ spacer 9 | 571 | 12 | 3′ spacer 8 | 1916 | 10 | ++++ | + | + | ++ |
| 5′ spacer 9 | 571 | 12 | 3′ spacer 9 | 1934 | 10 | ++++ | + | + | ++ |
| 5′ spacer 9 | 571 | 12 | 3′ spacer 9 | 1935 | 12 | ++++ | + | + | ++ |
| 5′ spacer 9 | 571 | 12 | 3′ spacer 10 | 1952 | 10 | ++ | NA | + | ++ |
| 5′ spacer 9 | 571 | 12 | 3′ spacer 10 | 1953 | 12 | ++ | + | + | ++ |
| 5′ spacer 9 | 571 | 12 | 3′ spacer 11 | 2279 | 10 | ++ | + | + | ++ |
| 5′ spacer 9 | 571 | 12 | 3′ spacer 11 | 2280 | 12 | +++ | + | + | ++ |
| 5′ spacer 9 | 571 | 12 | 3′ spacer 16 | 2369 | 10 | ++++ | + | + | ++ |
| 5′ spacer 9 | 571 | 12 | 3′ spacer 12 | 2297 | 10 | +++ | + | NA | + |
| 5′ spacer 9 | 571 | 12 | 3′ spacer 12 | 2298 | 12 | ++++ | + | NA | ++ |
| 5′ spacer 9 | 571 | 12 | 3′ spacer 17 | 2689 | 10 | ++++ | + | NA | ++ |
| 5′ spacer 9 | 571 | 12 | 3′ spacer 17 | 2690 | 12 | ++++ | + | NA | ++ |
| 5′ spacer 9 | 571 | 12 | 3′ spacer 5 | 1543 | 12 | ++++ | + | NA | ++ |
| 5′ spacer 9 | 571 | 12 | 3′ spacer 13 | 2315 | 10 | + | + | NA | + |
| 5′ spacer 9 | 571 | 12 | 3′ spacer 13 | 2316 | 12 | ++ | + | NA | + |
| 5′ spacer 9 | 571 | 12 | 3′ spacer 14 | 2333 | 10 | ++++ | + | NA | + |
| 5′ spacer 9 | 571 | 12 | 3′ spacer 14 | 2334 | 12 | ++++ | + | NA | + |
| 5′ spacer 9 | 571 | 12 | 3′ spacer 6 | 1880 | 11 | ++++ | + | + | + |
| 5′ spacer 9 | 571 | 12 | 3′ spacer 6 | 1881 | 13 | ++++ | + | + | + |
| 5′ spacer 9 | 571 | 12 | 3′ spacer 15 | 2352 | 12 | +++ | + | + | + |
| 5′ spacer 9 | 571 | 12 | 3′ spacer 7 | 1898 | 11 | ++++ | + | + | + |
| 5′ spacer 9 | 571 | 12 | 3′ spacer 7 | 1899 | 13 | ++++ | + | + | + |
| 5′ spacer 9 | 571 | 12 | 3′ spacer 2 | 1399 | 12 | +++ | + | + | + |

[1297] A total of twenty-eight (28) 5′ PEgRNAs and twenty-five (25) 3′ PEgRNAs were screened. All 5′ PEgRNAs comprised an RTT of SEQ ID NO: 2691 (RTT pairing NO: 1). All 3′ PEgRNAs comprised an RTT of SEQ ID NO: 3075 (RTT pairing NO: 1). The 5′ PEgRNA spacers that were screened were 5′ spacers 3 and 7-19 (SEQ ID NOs: 39, 518, 536, 554, 572, 590, 912, 929, 947, 965, 983, 1001, 1019, and 1341). The 3′ PEgRNA spacers that were screened were 3′ spacers 2 and 5-17 (SEQ ID NOs: 1381, 1525, 1864, 1882, 1900, 1918, 1936, 2263, 2281, 2299, 2317, 2335, 2353, and 2673). The 5′ PEgRNA and 3′ PEgRNA PBS lengths were 10, 11, 12 or 13 nucleotides as indicated in Table 52. Successful dual prime editing was observed in all PEgRNA pairs examined.

[1298] Table 53 summarizes 5′ spacers tested in Examples 2 and 3. Table 54 summarizes 3′ spacers tested in Examples 2 and 3. The Nick-to-repeat distance indicates the distance from the nick generated by the PEgRNA to the end of the CTG repeats, where in the end of the CTG repeats is the end proximal to the nick.

TABLE 53
5′ spacers tested in Examples 2 and 3

| Spacer | SEQ | Nick-to-repeat |
|---|---|---|
| No. | ID NO: | distance |
| 5′ spacer1 | 1 | 7 |
| 5′ spacer3 | 39 | 50 |
| 5′ spacer4 | 58 | 70 |
| 5′ spacer5 | 77 | 172 |
| 5′ spacer6 | 484 | 199 |
| 5′ spacer7 | 518 | 200 |
| 5′ spacer8 | 536 | 173 |
| 5′ spacer9 | 554 | 167 |
| 5′ spacer10 | 572 | 117 |
| 5′ spacer11 | 590 | 85 |
| 5′ spacer12 | 912 | 22 |
| 5′ spacer13 | 929 | 247 |
| 5′ spacer14 | 947 | 190 |
| 5′ spacer15 | 965 | 66 |
| 5′ spacer16 | 983 | 56 |
| 5′ spacer17 | 1001 | 39 |
| 5′ spacer18 | 1019 | 30 |
| 5′ spacer19 | 1341 | 8 |

TABLE 54
3′ spacers tested in Examples 2 and 3

| | SEQ | Nick-to-repeat |
|---|---|---|
| Spacer No. | ID NO: | distance |
| 3′ spacer 1 | 1359 | 47 |
| 3′ spacer 2 | 1381 | 96 |
| 3′ spacer 3 | 1403 | 127 |
| 3′ spacer 4 | 1503 | 239 |
| 3′ spacer 5 | 1525 | 305 |
| 3′ spacer 6 | 1864 | 36 |
| 3′ spacer 7 | 1882 | 91 |
| 3′ spacer 8 | 1900 | 100 |
| 3′ spacer 9 | 1918 | 122 |
| 3′ spacer 10 | 1936 | 171 |
| 3′ spacer 11 | 2263 | 204 |
| 3′ spacer 12 | 2281 | 259 |
| 3′ spacer 13 | 2299 | 333 |
| 3′ spacer 14 | 2317 | 342 |
| 3′ spacer 15 | 2335 | 74 |
| 3′ spacer 16 | 2353 | 231 |
| 3′ spacer 17 | 2673 | 289 |

### Example 4. Dual Prime Editing for Excision of CTG Repeats Associated with DM1 without Insertion

[1299] PEgRNA pairs were designed to remove the CTG repeats in the DMPK gene without insertion of any exogenous sequence. PEgRNAs were assembled as described in Example 1. Wild type HEK 293T cells were transfected with polynucleotides encoding a prime editor fusion protein and a pair of PEgRNA in arrayed 96-well plates for assessment of editing by high-throughput sequencing. Three days after transfection, gDNA was harvested in lysis buffer for high throughput sequencing and sequenced using MiSeq. Editing efficiency is reflected by desired excision of the CTG repeats. Editing efficiency and indel frequency were assessed with Version 1 of CRISPResso2 dual-flap analysis, as described in Example 3.

[1300] The results are summarized in Table 55. In Table 55, each row presents information for a pair of PEgRNAs (i.e., a 5′ PEgRNA and a 3′ PEgRNA) used in dual prime editing. Each PEgRNA is identified by a sequence identifier (“SEQ ID NO”), and information is also presented for the RTT length and PBS length as well as the RTT Pairing number for each PEgRNA. The RTT Paring number assigned to each PEgRNA indicates the spacer number of the pairing PEgRNA, as provided in Tables 39 and 40. A total of fifteen (15) 5′ PEgRNAs and fifteen (15) 3′ PEgRNAs were screened. All 5′ PEgRNAs comprised a spacer of SEQ ID NO: 484 (Paring number for 3′ RTT: 385). All 3′ PEgRNAs comprised a spacer of SEQ ID NO: 1525 (Paring number for 5′ RTT: 389). Different 5′ PEgRNA and 3′ PEgRNA PBS lengths 8, 10, 12, 14, and 17, were tested as shown in Table 55. The RTT length in this experiment reflects the length of region of complementarity between a RTT and the endogenous DMPK gene sequence. For example, the 5′ RTT length in this experiment reflects the region of complementarity between the 5′ RTT and the DMPK strand having the search target sequence of the 3′ PEgRA (specifically, the DMPK strand having the sequence 3′ to nucleotide 4 of the search target of the 3′ PEgRNA). The 3′ RTT length in this experiment reflects the region of complementarity between the 3′ RTT and the DMPK strand having the search target sequence of the 5′ PEgRA (specifically, the DMPK strand having the sequence 3′ to nucleotide 4 of the search target of the 3′ PEgRNA). Variant 5′ PEgRNA and 3′ PEgRNA RTT lengths 20, 25, and 30 nucleotides were tested as shown in Table 55.

[1301] The following scale was used for editing efficiency: PEgRNA pairs exhibiting editing efficiency of 0% are indicated with “−”, PEgRNA pairs exhibiting editing efficiency above 0% and up to 25% are indicated with “+”, PEgRNA pairs exhibiting editing efficiency above 25% and up to 50% are indicated with “++”, PEgRNA pairs exhibiting editing efficiency above 50% and up to 75% are indicated with “+++”, and PEgRNA pairs exhibiting editing efficiency above 75% and up to 100% are indicated with “++++”. The following scale was used for indel rates: PEgRNA pairs exhibiting indel rates of 0% are indicated with “−”, PEgRNA pairs exhibiting indel rates above 0% and up to 5% are indicated with “+”, PEgRNA pairs exhibiting indel rates above 5% and up to 25% are indicated with “++”, PEgRNA pairs exhibiting indel rates above 25% and up to 50% are indicated with “+++”, and PEgRNA pairs exhibiting indel rates above 50% are indicated with “++++”. Successful dual prime editing resulting in deletion of CTG repeats was observed in all PEgRNA pairs tested.

TABLE 55
Dual prime editing for CTG excision without insertion in HEK 293T cells.

| 5′ | 5′ | 5′ | 5′ | 3′ | 3′ | 3′ | 3′ | | | | |
|---|---|---|---|---|---|---|---|---|---|---|---|
| pegRNA | pegRNA | pegRNA | RTT | pegRNA | pegRNA | pegRNA | RTT | | | | % indel |
| SEQ ID | PBS | RTT | paring | SEQ ID | PBS | RTT | paring | % editing | % indel | % indel | nick to |
| NO: | length | length | No. | NO: | length | length | No. | efficiency | Forward | Reverse | nick |
| 504 | 10 | 20 | 385 | 1549 | 10 | 20 | 389 | ++ | + | + | ++ |
| 504 | 10 | 20 | 385 | 1554 | 10 | 25 | 389 | ++ | + | + | + |
| 504 | 10 | 20 | 385 | 1559 | 10 | 30 | 389 | + | + | + | ++ |
| 504 | 10 | 20 | 385 | 1550 | 12 | 20 | 389 | ++ | + | + | + |
| 504 | 10 | 20 | 385 | 1555 | 12 | 25 | 389 | ++++ | ++ | + | ++ |
| 504 | 10 | 20 | 385 | 1560 | 12 | 30 | 389 | ++ | ++ | + | ++ |
| 504 | 10 | 20 | 385 | 1551 | 14 | 20 | 389 | + | + | + | + |
| 504 | 10 | 20 | 385 | 1556 | 14 | 25 | 389 | ++++ | ++ | + | ++ |
| 504 | 10 | 20 | 385 | 1561 | 14 | 30 | 389 | + | + | + | + |
| 504 | 10 | 20 | 385 | 1552 | 17 | 20 | 389 | ++ | + | + | + |
| 504 | 10 | 20 | 385 | 1557 | 17 | 25 | 389 | + | + | + | + |
| 504 | 10 | 20 | 385 | 1562 | 17 | 30 | 389 | ++ | + | + | + |
| 504 | 10 | 20 | 385 | 1548 | 8 | 20 | 389 | ++++ | + | + | + |
| 504 | 10 | 20 | 385 | 1553 | 8 | 25 | 389 | ++ | + | + | ++ |
| 504 | 10 | 20 | 385 | 1558 | 8 | 30 | 389 | +++ | + | + | + |
| 509 | 10 | 25 | 385 | 1549 | 10 | 20 | 389 | ++ | +++ | + | +++ |
| 509 | 10 | 25 | 385 | 1554 | 10 | 25 | 389 | ++ | + | + | + |
| 509 | 10 | 25 | 385 | 1559 | 10 | 30 | 389 | + | ++ | + | ++ |
| 509 | 10 | 25 | 385 | 1550 | 12 | 20 | 389 | + | ++ | + | ++ |
| 509 | 10 | 25 | 385 | 1555 | 12 | 25 | 389 | ++++ | ++ | + | ++ |
| 509 | 10 | 25 | 385 | 1560 | 12 | 30 | 389 | ++ | + | + | + |
| 509 | 10 | 25 | 385 | 1551 | 14 | 20 | 389 | + | ++ | + | ++ |
| 509 | 10 | 25 | 385 | 1556 | 14 | 25 | 389 | +++ | + | + | + |
| 509 | 10 | 25 | 385 | 1561 | 14 | 30 | 389 | + | + | + | + |
| 509 | 10 | 25 | 385 | 1552 | 17 | 20 | 389 | + | + | + | + |
| 509 | 10 | 25 | 385 | 1557 | 17 | 25 | 389 | + | ++ | + | ++ |
| 509 | 10 | 25 | 385 | 1562 | 17 | 30 | 389 | +++ | + | + | + |
| 509 | 10 | 25 | 385 | 1548 | 8 | 20 | 389 | ++ | ++ | + | ++ |
| 509 | 10 | 25 | 385 | 1553 | 8 | 25 | 389 | ++ | + | + | + |
| 509 | 10 | 25 | 385 | 1558 | 8 | 30 | 389 | +++ | ++ | + | ++ |
| 514 | 10 | 30 | 385 | 1549 | 10 | 20 | 389 | +++ | + | + | + |
| 514 | 10 | 30 | 385 | 1554 | 10 | 25 | 389 | ++++ | + | + | + |
| 514 | 10 | 30 | 385 | 1559 | 10 | 30 | 389 | ++ | + | + | ++ |
| 514 | 10 | 30 | 385 | 1550 | 12 | 20 | 389 | +++ | +++ | + | +++ |
| 514 | 10 | 30 | 385 | 1555 | 12 | 25 | 389 | ++++ | + | + | + |
| 514 | 10 | 30 | 385 | 1560 | 12 | 30 | 389 | +++ | + | + | + |
| 514 | 10 | 30 | 385 | 1551 | 14 | 20 | 389 | ++ | +++ | + | +++ |
| 514 | 10 | 30 | 385 | 1556 | 14 | 25 | 389 | ++++ | + | + | + |
| 514 | 10 | 30 | 385 | 1561 | 14 | 30 | 389 | + | ++ | + | ++ |
| 514 | 10 | 30 | 385 | 1552 | 17 | 20 | 389 | ++ | +++ | − | +++ |
| 514 | 10 | 30 | 385 | 1557 | 17 | 25 | 389 | ++ | + | + | + |
| 514 | 10 | 30 | 385 | 1562 | 17 | 30 | 389 | ++++ | + | + | + |
| 514 | 10 | 30 | 385 | 1548 | 8 | 20 | 389 | ++++ | + | + | + |
| 514 | 10 | 30 | 385 | 1553 | 8 | 25 | 389 | +++ | ++++ | + | ++++ |
| 514 | 10 | 30 | 385 | 1558 | 8 | 30 | 389 | ++++ | + | + | + |
| 505 | 12 | 20 | 385 | 1549 | 10 | 20 | 389 | +++ | + | + | ++ |
| 505 | 12 | 20 | 385 | 1554 | 10 | 25 | 389 | ++ | ++ | + | ++ |
| 505 | 12 | 20 | 385 | 1559 | 10 | 30 | 389 | + | + | + | + |
| 505 | 12 | 20 | 385 | 1550 | 12 | 20 | 389 | ++ | + | + | + |
| 505 | 12 | 20 | 385 | 1555 | 12 | 25 | 389 | ++++ | ++ | + | ++ |
| 505 | 12 | 20 | 385 | 1560 | 12 | 30 | 389 | ++ | + | + | + |
| 505 | 12 | 20 | 385 | 1551 | 14 | 20 | 389 | + | ++ | + | ++ |
| 505 | 12 | 20 | 385 | 1556 | 14 | 25 | 389 | ++++ | + | + | + |
| 505 | 12 | 20 | 385 | 1561 | 14 | 30 | 389 | + | ++ | + | ++ |
| 505 | 12 | 20 | 385 | 1552 | 17 | 20 | 389 | + | + | + | + |
| 505 | 12 | 20 | 385 | 1557 | 17 | 25 | 389 | + | + | + | + |
| 505 | 12 | 20 | 385 | 1562 | 17 | 30 | 389 | ++ | + | + | + |
| 505 | 12 | 20 | 385 | 1548 | 8 | 20 | 389 | ++++ | + | + | + |
| 505 | 12 | 20 | 385 | 1553 | 8 | 25 | 389 | +++ | + | + | + |
| 505 | 12 | 20 | 385 | 1558 | 8 | 30 | 389 | ++ | + | + | ++ |
| 510 | 12 | 25 | 385 | 1549 | 10 | 20 | 389 | ++ | ++ | + | ++ |
| 510 | 12 | 25 | 385 | 1554 | 10 | 25 | 389 | + | + | + | + |
| 510 | 12 | 25 | 385 | 1559 | 10 | 30 | 389 | ++ | ++ | + | ++ |
| 510 | 12 | 25 | 385 | 1550 | 12 | 20 | 389 | ++ | + | + | + |
| 510 | 12 | 25 | 385 | 1555 | 12 | 25 | 389 | ++++ | + | + | + |
| 510 | 12 | 25 | 385 | 1560 | 12 | 30 | 389 | +++ | + | + | ++ |
| 510 | 12 | 25 | 385 | 1551 | 14 | 20 | 389 | ++ | + | + | + |
| 510 | 12 | 25 | 385 | 1556 | 14 | 25 | 389 | +++ | + | + | + |
| 510 | 12 | 25 | 385 | 1561 | 14 | 30 | 389 | + | + | + | + |
| 510 | 12 | 25 | 385 | 1552 | 17 | 20 | 389 | + | ++ | + | ++ |
| 510 | 12 | 25 | 385 | 1557 | 17 | 25 | 389 | + | + | + | + |
| 510 | 12 | 25 | 385 | 1562 | 17 | 30 | 389 | ++ | + | + | + |
| 510 | 12 | 25 | 385 | 1548 | 8 | 20 | 389 | + | + | ++ | ++ |
| 510 | 12 | 25 | 385 | 1553 | 8 | 25 | 389 | ++ | + | ++ | ++ |
| 510 | 12 | 25 | 385 | 1558 | 8 | 30 | 389 | +++ | + | + | + |
| 515 | 12 | 30 | 385 | 1549 | 10 | 20 | 389 | ++ | + | + | + |
| 515 | 12 | 30 | 385 | 1554 | 10 | 25 | 389 | ++ | + | + | + |
| 515 | 12 | 30 | 385 | 1559 | 10 | 30 | 389 | ++ | ++ | + | ++ |
| 515 | 12 | 30 | 385 | 1550 | 12 | 20 | 389 | ++ | + | + | + |
| 515 | 12 | 30 | 385 | 1555 | 12 | 25 | 389 | ++++ | + | + | + |
| 515 | 12 | 30 | 385 | 1560 | 12 | 30 | 389 | + | + | + | + |
| 515 | 12 | 30 | 385 | 1551 | 14 | 20 | 389 | ++ | + | + | + |
| 515 | 12 | 30 | 385 | 1556 | 14 | 25 | 389 | ++++ | + | + | + |
| 515 | 12 | 30 | 385 | 1561 | 14 | 30 | 389 | ++ | + | + | + |
| 515 | 12 | 30 | 385 | 1552 | 17 | 20 | 389 | ++ | + | + | + |
| 515 | 12 | 30 | 385 | 1557 | 17 | 25 | 389 | + | ++ | + | ++ |
| 515 | 12 | 30 | 385 | 1562 | 17 | 30 | 389 | + | + | − | + |
| 515 | 12 | 30 | 385 | 1548 | 8 | 20 | 389 | + | + | + | + |
| 515 | 12 | 30 | 385 | 1553 | 8 | 25 | 389 | ++ | + | + | + |
| 515 | 12 | 30 | 385 | 1558 | 8 | 30 | 389 | ++ | + | + | + |
| 506 | 14 | 20 | 385 | 1549 | 10 | 20 | 389 | + | + | + | + |
| 506 | 14 | 20 | 385 | 1554 | 10 | 25 | 389 | ++ | + | + | + |
| 506 | 14 | 20 | 385 | 1559 | 10 | 30 | 389 | + | ++ | + | ++ |
| 506 | 14 | 20 | 385 | 1550 | 12 | 20 | 389 | +++ | + | + | + |
| 506 | 14 | 20 | 385 | 1555 | 12 | 25 | 389 | ++++ | + | + | + |
| 506 | 14 | 20 | 385 | 1560 | 12 | 30 | 389 | ++ | + | + | + |
| 506 | 14 | 20 | 385 | 1551 | 14 | 20 | 389 | ++ | +++ | + | +++ |
| 506 | 14 | 20 | 385 | 1556 | 14 | 25 | 389 | ++++ | ++ | + | +++ |
| 506 | 14 | 20 | 385 | 1561 | 14 | 30 | 389 | ++ | + | + | + |
| 506 | 14 | 20 | 385 | 1552 | 17 | 20 | 389 | + | ++ | + | ++ |
| 506 | 14 | 20 | 385 | 1557 | 17 | 25 | 389 | + | + | + | + |
| 506 | 14 | 20 | 385 | 1562 | 17 | 30 | 389 | ++ | ++ | + | ++ |
| 506 | 14 | 20 | 385 | 1548 | 8 | 20 | 389 | +++ | ++ | + | ++ |
| 506 | 14 | 20 | 385 | 1553 | 8 | 25 | 389 | +++ | + | + | + |
| 506 | 14 | 20 | 385 | 1558 | 8 | 30 | 389 | ++ | + | + | + |
| 511 | 14 | 25 | 385 | 1549 | 10 | 20 | 389 | + | + | + | ++ |
| 511 | 14 | 25 | 385 | 1554 | 10 | 25 | 389 | ++ | ++ | + | ++ |
| 511 | 14 | 25 | 385 | 1559 | 10 | 30 | 389 | ++ | + | + | + |
| 511 | 14 | 25 | 385 | 1550 | 12 | 20 | 389 | + | + | + | + |
| 511 | 14 | 25 | 385 | 1555 | 12 | 25 | 389 | ++++ | + | + | + |
| 511 | 14 | 25 | 385 | 1560 | 12 | 30 | 389 | ++ | + | + | + |
| 511 | 14 | 25 | 385 | 1551 | 14 | 20 | 389 | ++ | + | + | + |
| 511 | 14 | 25 | 385 | 1556 | 14 | 25 | 389 | ++ | + | + | + |
| 511 | 14 | 25 | 385 | 1561 | 14 | 30 | 389 | + | ++ | + | ++ |
| 511 | 14 | 25 | 385 | 1552 | 17 | 20 | 389 | + | + | ++ | ++ |
| 511 | 14 | 25 | 385 | 1557 | 17 | 25 | 389 | + | + | + | + |
| 511 | 14 | 25 | 385 | 1562 | 17 | 30 | 389 | ++ | + | + | + |
| 511 | 14 | 25 | 385 | 1548 | 8 | 20 | 389 | + | ++ | ++ | ++ |
| 511 | 14 | 25 | 385 | 1553 | 8 | 25 | 389 | ++ | + | + | + |
| 511 | 14 | 25 | 385 | 1558 | 8 | 30 | 389 | ++ | + | + | ++ |
| 516 | 14 | 30 | 385 | 1549 | 10 | 20 | 389 | ++ | ++ | + | ++ |
| 516 | 14 | 30 | 385 | 1554 | 10 | 25 | 389 | ++ | ++ | + | ++ |
| 516 | 14 | 30 | 385 | 1559 | 10 | 30 | 389 | ++ | ++ | + | ++ |
| 516 | 14 | 30 | 385 | 1550 | 12 | 20 | 389 | ++ | + | + | + |
| 516 | 14 | 30 | 385 | 1555 | 12 | 25 | 389 | ++++ | + | + | + |
| 516 | 14 | 30 | 385 | 1560 | 12 | 30 | 389 | ++ | + | + | + |
| 516 | 14 | 30 | 385 | 1551 | 14 | 20 | 389 | ++ | + | + | + |
| 516 | 14 | 30 | 385 | 1556 | 14 | 25 | 389 | ++++ | + | + | + |
| 516 | 14 | 30 | 385 | 1561 | 14 | 30 | 389 | + | ++ | + | ++ |
| 516 | 14 | 30 | 385 | 1552 | 17 | 20 | 389 | ++ | + | + | + |
| 516 | 14 | 30 | 385 | 1557 | 17 | 25 | 389 | ++ | + | + | + |
| 516 | 14 | 30 | 385 | 1562 | 17 | 30 | 389 | ++ | + | + | + |
| 516 | 14 | 30 | 385 | 1548 | 8 | 20 | 389 | ++++ | + | + | + |
| 516 | 14 | 30 | 385 | 1553 | 8 | 25 | 389 | ++ | + | + | + |
| 516 | 14 | 30 | 385 | 1558 | 8 | 30 | 389 | +++ | + | + | + |
| 507 | 17 | 20 | 385 | 1549 | 10 | 20 | 389 | +++ | ++ | + | ++ |
| 507 | 17 | 20 | 385 | 1554 | 10 | 25 | 389 | ++ | ++ | + | ++ |
| 507 | 17 | 20 | 385 | 1559 | 10 | 30 | 389 | + | ++ | + | ++ |
| 507 | 17 | 20 | 385 | 1550 | 12 | 20 | 389 | + | + | + | + |
| 507 | 17 | 20 | 385 | 1555 | 12 | 25 | 389 | ++++ | + | + | + |
| 507 | 17 | 20 | 385 | 1560 | 12 | 30 | 389 | ++ | ++ | + | ++ |
| 507 | 17 | 20 | 385 | 1551 | 14 | 20 | 389 | + | ++ | + | ++ |
| 507 | 17 | 20 | 385 | 1556 | 14 | 25 | 389 | +++ | ++ | + | ++ |
| 507 | 17 | 20 | 385 | 1561 | 14 | 30 | 389 | + | + | + | + |
| 507 | 17 | 20 | 385 | 1552 | 17 | 20 | 389 | + | ++++ | + | ++++ |
| 507 | 17 | 20 | 385 | 1557 | 17 | 25 | 389 | + | ++ | + | ++ |
| 507 | 17 | 20 | 385 | 1562 | 17 | 30 | 389 | + | + | + | + |
| 507 | 17 | 20 | 385 | 1548 | 8 | 20 | 389 | ++++ | ++ | + | ++ |
| 507 | 17 | 20 | 385 | 1553 | 8 | 25 | 389 | ++ | + | + | + |
| 507 | 17 | 20 | 385 | 1558 | 8 | 30 | 389 | ++ | + | + | + |
| 512 | 17 | 25 | 385 | 1549 | 10 | 20 | 389 | + | + | + | + |
| 512 | 17 | 25 | 385 | 1554 | 10 | 25 | 389 | ++ | + | + | + |
| 512 | 17 | 25 | 385 | 1559 | 10 | 30 | 389 | ++ | + | + | + |
| 512 | 17 | 25 | 385 | 1550 | 12 | 20 | 389 | + | ++ | + | ++ |
| 512 | 17 | 25 | 385 | 1555 | 12 | 25 | 389 | ++++ | ++ | + | ++ |
| 512 | 17 | 25 | 385 | 1560 | 12 | 30 | 389 | +++ | + | + | + |
| 512 | 17 | 25 | 385 | 1551 | 14 | 20 | 389 | + | + | + | + |
| 512 | 17 | 25 | 385 | 1556 | 14 | 25 | 389 | +++ | ++ | + | ++ |
| 512 | 17 | 25 | 385 | 1561 | 14 | 30 | 389 | ++ | + | + | + |
| 512 | 17 | 25 | 385 | 1552 | 17 | 20 | 389 | + | ++ | + | ++ |
| 512 | 17 | 25 | 385 | 1557 | 17 | 25 | 389 | + | + | + | + |
| 512 | 17 | 25 | 385 | 1562 | 17 | 30 | 389 | ++ | + | + | + |
| 512 | 17 | 25 | 385 | 1548 | 8 | 20 | 389 | ++++ | + | + | + |
| 512 | 17 | 25 | 385 | 1553 | 8 | 25 | 389 | + | + | + | + |
| 512 | 17 | 25 | 385 | 1558 | 8 | 30 | 389 | ++ | + | + | + |
| 517 | 17 | 30 | 385 | 1549 | 10 | 20 | 389 | + | ++ | + | ++ |
| 517 | 17 | 30 | 385 | 1554 | 10 | 25 | 389 | ++ | ++ | + | ++ |
| 517 | 17 | 30 | 385 | 1559 | 10 | 30 | 389 | + | + | + | + |
| 517 | 17 | 30 | 385 | 1550 | 12 | 20 | 389 | + | + | + | + |
| 517 | 17 | 30 | 385 | 1555 | 12 | 25 | 389 | ++++ | ++ | + | ++ |
| 517 | 17 | 30 | 385 | 1560 | 12 | 30 | 389 | + | ++ | + | ++ |
| 517 | 17 | 30 | 385 | 1551 | 14 | 20 | 389 | + | + | + | + |
| 517 | 17 | 30 | 385 | 1556 | 14 | 25 | 389 | +++ | + | + | + |
| 517 | 17 | 30 | 385 | 1561 | 14 | 30 | 389 | + | + | + | + |
| 517 | 17 | 30 | 385 | 1552 | 17 | 20 | 389 | + | − | ++ | ++ |
| 517 | 17 | 30 | 385 | 1557 | 17 | 25 | 389 | + | ++ | + | ++ |
| 517 | 17 | 30 | 385 | 1562 | 17 | 30 | 389 | + | + | + | ++ |
| 517 | 17 | 30 | 385 | 1548 | 8 | 20 | 389 | + | +++ | + | +++ |
| 517 | 17 | 30 | 385 | 1553 | 8 | 25 | 389 | ++ | ++ | + | ++ |
| 517 | 17 | 30 | 385 | 1558 | 8 | 30 | 389 | ++ | + | + | + |
| 503 | 8 | 20 | 385 | 1549 | 10 | 20 | 389 | ++ | + | + | + |
| 503 | 8 | 20 | 385 | 1554 | 10 | 25 | 389 | ++ | + | + | + |
| 503 | 8 | 20 | 385 | 1559 | 10 | 30 | 389 | + | ++ | + | ++ |
| 503 | 8 | 20 | 385 | 1550 | 12 | 20 | 389 | ++ | ++ | + | ++ |
| 503 | 8 | 20 | 385 | 1555 | 12 | 25 | 389 | ++++ | + | + | + |
| 503 | 8 | 20 | 385 | 1560 | 12 | 30 | 389 | ++ | ++ | + | ++ |
| 503 | 8 | 20 | 385 | 1551 | 14 | 20 | 389 | +++ | + | + | + |
| 503 | 8 | 20 | 385 | 1556 | 14 | 25 | 389 | ++++ | + | + | + |
| 503 | 8 | 20 | 385 | 1561 | 14 | 30 | 389 | + | ++ | + | ++ |
| 503 | 8 | 20 | 385 | 1552 | 17 | 20 | 389 | +++ | +++ | + | +++ |
| 503 | 8 | 20 | 385 | 1557 | 17 | 25 | 389 | + | ++ | + | ++ |
| 503 | 8 | 20 | 385 | 1562 | 17 | 30 | 389 | ++ | + | + | + |
| 503 | 8 | 20 | 385 | 1548 | 8 | 20 | 389 | ++++ | + | + | + |
| 503 | 8 | 20 | 385 | 1553 | 8 | 25 | 389 | + | + | + | + |
| 503 | 8 | 20 | 385 | 1558 | 8 | 30 | 389 | ++ | + | + | + |
| 508 | 8 | 25 | 385 | 1549 | 10 | 20 | 389 | ++ | ++ | + | ++ |
| 508 | 8 | 25 | 385 | 1554 | 10 | 25 | 389 | + | + | + | + |
| 508 | 8 | 25 | 385 | 1559 | 10 | 30 | 389 | + | + | + | + |
| 508 | 8 | 25 | 385 | 1550 | 12 | 20 | 389 | + | + | + | + |
| 508 | 8 | 25 | 385 | 1555 | 12 | 25 | 389 | ++++ | + | + | + |
| 508 | 8 | 25 | 385 | 1560 | 12 | 30 | 389 | +++ | + | + | + |
| 508 | 8 | 25 | 385 | 1551 | 14 | 20 | 389 | + | ++++ | + | ++++ |
| 508 | 8 | 25 | 385 | 1556 | 14 | 25 | 389 | ++++ | + | + | + |
| 508 | 8 | 25 | 385 | 1561 | 14 | 30 | 389 | + | + | + | + |
| 508 | 8 | 25 | 385 | 1552 | 17 | 20 | 389 | + | + | + | + |
| 508 | 8 | 25 | 385 | 1557 | 17 | 25 | 389 | + | ++ | + | ++ |
| 508 | 8 | 25 | 385 | 1562 | 17 | 30 | 389 | +++ | + | + | ++ |
| 508 | 8 | 25 | 385 | 1548 | 8 | 20 | 389 | ++++ | + | + | + |
| 508 | 8 | 25 | 385 | 1553 | 8 | 25 | 389 | ++ | + | + | ++ |
| 508 | 8 | 25 | 385 | 1558 | 8 | 30 | 389 | +++ | + | + | + |
| 513 | 8 | 30 | 385 | 1549 | 10 | 20 | 389 | + | + | + | + |
| 513 | 8 | 30 | 385 | 1554 | 10 | 25 | 389 | +++ | + | + | + |
| 513 | 8 | 30 | 385 | 1559 | 10 | 30 | 389 | + | + | + | + |
| 513 | 8 | 30 | 385 | 1550 | 12 | 20 | 389 | + | + | + | ++ |
| 513 | 8 | 30 | 385 | 1555 | 12 | 25 | 389 | ++++ | + | + | + |
| 513 | 8 | 30 | 385 | 1560 | 12 | 30 | 389 | ++ | + | + | + |
| 513 | 8 | 30 | 385 | 1551 | 14 | 20 | 389 | + | + | + | + |
| 513 | 8 | 30 | 385 | 1556 | 14 | 25 | 389 | +++ | + | + | + |
| 513 | 8 | 30 | 385 | 1561 | 14 | 30 | 389 | + | + | + | + |
| 513 | 8 | 30 | 385 | 1552 | 17 | 20 | 389 | + | + | + | ++ |
| 513 | 8 | 30 | 385 | 1557 | 17 | 25 | 389 | + | + | + | + |
| 513 | 8 | 30 | 385 | 1562 | 17 | 30 | 389 | ++ | + | + | + |
| 513 | 8 | 30 | 385 | 1548 | 8 | 20 | 389 | ++++ | + | + | + |
| 513 | 8 | 30 | 385 | 1553 | 8 | 25 | 389 | ++++ | + | + | + |
| 513 | 8 | 30 | 385 | 1558 | 8 | 30 | 389 | +++ | + | ++ | ++ |

### Example 5. Dual Prime Editing for Excision of CTG Repeats in Myotonic Dystrophy Type 1 (DM1) Patient iPSC Cells

[1302] Based on the results as shown in Examples 2 and 3, 5′ PEgRNAs having a spacer identified by SEQ ID NO: 77, 484, 536, 590, 1019, or 1341 and 3′ PEgRNAs having a spacer identified by SEQ ID NO: 1525, 1900, 1936, 2263, 2281, 2299, 2353, or 2673 were selected for assessment in DM1 patient derived iPSC cells.

[1303] PEgRNAs were assembled as described in Example 1. iPSCs derived from myotonic dystrophy Type I patients were transfected with polynucleotides encoding a prime editor fusion protein and a pair of PEgRNAs as described in Example 1. Three days after transfection, gDNA was harvested in lysis buffer for sequencing and analysis with droplet digital PCR (ddPCR).

[1304] iPSC cells derived from three DM1 individuals were used. The three iPSC cell lines, iPSC1, iPSC2, and iPSC3, each carries 1600, 1150, and 238 CTG repeats in the DMPK gene, respectively (repeat numbers as reported by iPSC cell vendor). DMPK CTG repeat excision and attB integration with the dual prime editing system were assessed as follows: Reference samples were prepared by adding IDT gblock DNAs that contains desired edits into human gDNAs collected from healthy fibroblasts. The amount of edited reads was determined by a FAM primer set which includes a specific reverse primer targeting the RTT sequence that was introduced into the edited allele. The amount of total DMPK reads was determined by a HEX primer set which targets a different region of DMPK that is multiple kilobases away from the edited location. Editing efficiency for experimental samples was interpolated from a standard curve of reference samples containing different editing % (from 0 to 75%).

[1305] The results are summarized in Table 56. In Table 56, each row presents information for a pair of PEgRNAs (i.e., a 5′ PEgRNA and a 3′ PEgRNA) used in dual prime editing. Each PEgRNA is identified by a sequence identifier (“SEQ ID NO”), and information is also presented for the PBS length and spacer number of each PEgRNA that was tested. All 5′ PEgRNAs comprised an RTT of SEQ ID NO: 2691 (RTT pairing NO: 1). All 3′ PEgRNAs comprised an RTT of SEQ ID NO: 3075 (RTT pairing NO: 1). All 5′ PEgRNAs and 3′ PEgRNAs had a PBS length of 10 nt. A total of six (6) 5′ PEgRNAs and eight (8) 3′ PEgRNAs were tested. A total of six (6) 5′ spacers (SEQ ID NOs: 77, 484, 536, 590, 1019, and 1341) and eight (8) 3′ spacers (SEQ ID NOs: 1525, 1900, 1936, 2263, 2281, 2299, 2353, and 2673) were screened. The following scale was used for editing efficiency: PEgRNA pairs exhibiting editing efficiency above 0% and up to 25% are indicated with “+”, PEgRNA pairs exhibiting editing efficiency above 25% and up to 50% are indicated with “++”, PEgRNA pairs exhibiting editing efficiency above 50% and up to 75% are indicated with “+++”. Successful dual prime editing was observed in all PEgRNA pairs examined. Specifically efficient editing with 5′ PEgRNA having a spacer identified by SEQ ID No. 77, 536, or 1019 (5′ spacer No. 5, 8, or 18) paired with 3′ PEgRNA having a spacer identified by SEQ ID No. 1900, 1936, or 2673 (3′ spacer No. 8, 10, or 17) was observed consistently in all three patient derived cell lines.

TABLE 56
Dual prime editing for CTG excision in patient iPSCs.

| | 5′ | | | 3′ | | | | |
|---|---|---|---|---|---|---|---|---|
| 5′ | pegRNA | | 3′ | pegRNA | | | | |
| spacer | SEQ ID | 5′ PBS | spacer | SEQ ID | 3′ PBS | % editing | %editing | % editing |
| No. | NO: | length | No. | NO: | length | efficiency_iPSC1 | efficiency_iPSC2 | efficiency_iPSC3 |
| 5 | 94 | 10 | 5 | 1542 | 10 | + | ++ | + |
| 5 | 94 | 10 | 8 | 1916 | 10 | ++ | ++ | ++ |
| 5 | 94 | 10 | 10 | 1952 | 10 | +++ | +++ | ++ |
| 5 | 94 | 10 | 11 | 2279 | 10 | + | + | + |
| 5 | 94 | 10 | 12 | 2297 | 10 | + | + | + |
| 5 | 94 | 10 | 13 | 2315 | 10 | ++ | + | + |
| 5 | 94 | 10 | 16 | 2369 | 10 | + | + | + |
| 5 | 94 | 10 | 17 | 2689 | 10 | ++ | ++ | ++ |
| 6 | 501 | 10 | 5 | 1542 | 10 | + | + | + |
| 6 | 501 | 10 | 8 | 1916 | 10 | ++ | ++ | + |
| 6 | 501 | 10 | 10 | 1952 | 10 | +++ | +++ | ++ |
| 6 | 501 | 10 | 11 | 2279 | 10 | + | + | + |
| 6 | 501 | 10 | 12 | 2297 | 10 | + | + | + |
| 6 | 501 | 10 | 13 | 2315 | 10 | + | + | + |
| 6 | 501 | 10 | 16 | 2369 | 10 | + | + | + |
| 6 | 501 | 10 | 17 | 2689 | 10 | NA | ++ | + |
| 8 | 552 | 10 | 5 | 1542 | 10 | + | + | + |
| 8 | 552 | 10 | 8 | 1916 | 10 | ++ | ++ | ++ |
| 8 | 552 | 10 | 10 | 1952 | 10 | +++ | +++ | ++ |
| 8 | 552 | 10 | 11 | 2279 | 10 | + | + | + |
| 8 | 552 | 10 | 12 | 2297 | 10 | + | + | + |
| 8 | 552 | 10 | 13 | 2315 | 10 | + | + | + |
| 8 | 552 | 10 | 16 | 2369 | 10 | + | + | + |
| 8 | 552 | 10 | 17 | 2689 | 10 | ++ | ++ | + |
| 11 | 606 | 10 | 5 | 1542 | 10 | + | + | + |
| 11 | 606 | 10 | 8 | 1916 | 10 | + | + | + |
| 11 | 606 | 10 | 10 | 1952 | 10 | + | + | + |
| 11 | 606 | 10 | 11 | 2279 | 10 | + | + | + |
| 11 | 606 | 10 | 12 | 2297 | 10 | + | + | + |
| 11 | 606 | 10 | 13 | 2315 | 10 | + | + | + |
| 11 | 606 | 10 | 16 | 2369 | 10 | + | + | + |
| 11 | 606 | 10 | 17 | 2689 | 10 | + | + | + |
| 18 | 1035 | 10 | 5 | 1542 | 10 | + | + | + |
| 18 | 1035 | 10 | 8 | 1916 | 10 | ++ | ++ | ++ |
| 18 | 1035 | 10 | 10 | 1952 | 10 | +++ | +++ | ++ |
| 18 | 1035 | 10 | 11 | 2279 | 10 | + | + | + |
| 18 | 1035 | 10 | 12 | 2297 | 10 | + | + | + |
| 18 | 1035 | 10 | 13 | 2315 | 10 | ++ | + | + |
| 18 | 1035 | 10 | 16 | 2369 | 10 | + | + | + |
| 18 | 1035 | 10 | 17 | 2689 | 10 | ++ | ++ | ++ |
| 19 | 1357 | 10 | 5 | 1542 | 10 | + | + | + |
| 19 | 1357 | 10 | 8 | 1916 | 10 | + | + | + |
| 19 | 1357 | 10 | 10 | 1952 | 10 | ++ | ++ | + |
| 19 | 1357 | 10 | 11 | 2279 | 10 | + | + | + |
| 19 | 1357 | 10 | 12 | 2297 | 10 | + | + | + |
| 19 | 1357 | 10 | 13 | 2315 | 10 | + | + | + |
| 19 | 1357 | 10 | 16 | 2369 | 10 | + | + | + |
| 19 | 1357 | 10 | 17 | 2689 | 10 | + | + | + |

[1306] To further validate dual prime editing in DM1 patient derived cells, three 5′ pegRNAs and three 3′ pegRNAs were examined for editing efficiency in DM1 patient cells iPSC1. Five different doses of plasmid encoding the pegRNA was used (very low, low, mid, high, and very high) ranging from 0.1 ng to 20 ng per reaction. The iPSC cells were transfected, gRNA extracted and sequenced, and prime editing efficiency assessed as described above in this Example. The results are summarized in Table 57.

[1307] In Table 57, each row presents information for a pair of PEgRNAs (i.e., a 5′ PEgRNA and a 3′ PEgRNA) used in dual prime editing. Each PEgRNA is identified by a sequence identifier (“SEQ ID NO”). Two negative control conditions were included: 1) non-transfected iPSC1 cells (“NTC control”) and 2) iPSC1 cells transfected with nucleic acid expressing a green fluorescence protein (“GFP control”). The following scale was used for editing efficiency: PEgRNA pairs exhibiting editing efficiency of 0% and up to 2.5% are indicated with “−”, PEgRNA pairs exhibiting editing efficiency above 2.5% and up to 5% are indicated with “+”, PEgRNA pairs exhibiting editing efficiency above 5% and up to 15% are indicated with “++”, PEgRNA pairs exhibiting editing efficiency above 15% and up to 35% are indicated with “+++”, and PEgRNA pairs exhibiting editing efficiency above 35% and up to 65% are indicated with “++++”. Efficient dual prime editing was observed for each PEgRNA pair at mid or above-mid PEgRNA doses. For each PEgRNA pair, the editing efficiency showed dose dependency on the amount of PEgRNA used, indicating bona fide editing of the DMPK gene.

TABLE 57
Dual prime editing for CTG excision in patient iPSCs.

| 5′ PEgRNA | 3′ PEgRNA | PEgRNA | % Editing |
|---|---|---|---|
| SEQ ID NO: | SEQ ID NO: | Dose | Efficiency |
| 94 | 1916 | very high | ++++ |
| 94 | 1916 | very high | +++ |
| 94 | 1916 | high | ++++ |
| 94 | 1916 | high | +++ |
| 94 | 1916 | mid | +++ |
| 94 | 1916 | mid | ++ |
| 94 | 1916 | low | + |
| 94 | 1916 | low | + |
| 94 | 1916 | very low | − |
| 94 | 1916 | very low | ++ |
| 94 | 1952 | very high | ++++ |
| 94 | 1952 | very high | ++++ |
| 94 | 1952 | high | +++ |
| 94 | 1952 | high | ++++ |
| 94 | 1952 | mid | ++ |
| 94 | 1952 | mid | ++ |
| 94 | 1952 | low | + |
| 94 | 1952 | low | ++ |
| 94 | 1952 | very low | + |
| 94 | 1952 | very low | + |
| 94 | 2689 | very high | +++ |
| 94 | 2689 | very high | ++++ |
| 94 | 2689 | high | +++ |
| 94 | 2689 | high | +++ |
| 94 | 2689 | mid | ++ |
| 94 | 2689 | mid | ++ |
| 94 | 2689 | low | + |
| 94 | 2689 | low | + |
| 94 | 2689 | very low | + |
| 94 | 2689 | very low | + |
| 552 | 1916 | very high | ++++ |
| 552 | 1916 | very high | ++++ |
| 552 | 1916 | high | ++++ |
| 552 | 1916 | high | ++++ |
| 552 | 1916 | mid | +++ |
| 552 | 1916 | mid | +++ |
| 552 | 1916 | low | ++ |
| 552 | 1916 | low | ++ |
| 552 | 1916 | very low | + |
| 552 | 1916 | very low | + |
| 552 | 1952 | very high | ++++ |
| 552 | 1952 | very high | ++++ |
| 552 | 1952 | high | ++++ |
| 552 | 1952 | high | ++++ |
| 552 | 1952 | mid | +++ |
| 552 | 1952 | mid | +++ |
| 552 | 1952 | low | ++ |
| 552 | 1952 | low | ++ |
| 552 | 1952 | very low | ++ |
| 552 | 1952 | very low | + |
| 552 | 2689 | very high | +++ |
| 552 | 2689 | very high | ++++ |
| 552 | 2689 | high | +++ |
| 552 | 2689 | high | +++ |
| 552 | 2689 | mid | ++ |
| 552 | 2689 | mid | ++ |
| 552 | 2689 | low | + |
| 552 | 2689 | low | + |
| 552 | 2689 | very low | − |
| 552 | 2689 | very low | + |
| 1035 | 1916 | very high | +++ |
| 1035 | 1916 | very high | ++++ |
| 1035 | 1916 | high | ++++ |
| 1035 | 1916 | high | ++++ |
| 1035 | 1916 | mid | +++ |
| 1035 | 1916 | mid | +++ |
| 1035 | 1916 | low | + |
| 1035 | 1916 | low | ++ |
| 1035 | 1916 | very low | − |
| 1035 | 1916 | very low | − |
| 1035 | 1952 | very high | ++++ |
| 1035 | 1952 | very high | ++++ |
| 1035 | 1952 | high | ++++ |
| 1035 | 1952 | high | ++++ |
| 1035 | 1952 | mid | ++++ |
| 1035 | 1952 | mid | +++ |
| 1035 | 1952 | low | ++ |
| 1035 | 1952 | low | +++ |
| 1035 | 1952 | very low | − |
| 1035 | 1952 | very low | − |
| 1035 | 2689 | very high | +++ |
| 1035 | 2689 | very high | ++++ |
| 1035 | 2689 | high | +++ |
| 1035 | 2689 | high | +++ |
| 1035 | 2689 | mid | +++ |
| 1035 | 2689 | mid | +++ |
| 1035 | 2689 | low | − |
| 1035 | 2689 | low | + |
| 1035 | 2689 | very low | − |
| 1035 | 2689 | very low | − |
| GFP control | GFP control | NA | − |
| GFP control | GFP control | NA | − |
| GFP control | GFP control | NA | − |
| NTC control | NTC control | NA | − |
| NTC control | NTC control | NA | − |
| NTC control | NTC control | NA | − |

### Example 6: Dual Prime Editing for Excision of CTG Repeats in DM1 Patient iPSC Cells

[1308] 5′ PEgRNAs having spacer No. 5 paired with 3′ PEgRNAs having spacer No. 10 were further examined. Different PBS lengths were tested in DM1 patient cells iPSC2. The cells were transfected, gRNA harvested and sequenced, and CTG repeat excision and attB integration assessed as described in Example 5 above. The results are summarized in Table 58. In Table 58, each row presents information for a pair of PEgRNAs (i.e., a 5′ PEgRNA and a 3′ PEgRNA) used in dual prime editing. Each PEgRNA is identified by a sequence identifier (“SEQ ID NO”). The following scale was used for editing efficiency: PEgRNA pairs exhibiting editing efficiency above 1% and up to 5% are indicated with “+”, PEgRNA pairs exhibiting editing efficiency above 5% and up to 1000 are indicated with “++”, PEgRNA pairs exhibiting editing efficiency above 1000 and up to 2000 are indicated with “+++”, and PEgRNA pairs exhibiting editing efficiency above 2000 and up to 4000 are indicated with “++++”. Successful dual prime editing was observed for all PEgRNA pairs tested. In addition, particularly efficient prime editing was observed with PEgRNAs having PBS lengths of 8, 9, 10, 11, or 12 nucleotides.

TABLE 58
Dual prime editing for CTG
excision in patient iPSCs.

| 5′ pegRNA | 5′ pegRNA | 3′ pegRNA | 3′ pegRNA | % editing |
|---|---|---|---|---|
| SEQ ID NO: | PBS length | SEQ ID NO: | PBS length | efficiency |
| 93 | 8 | 1954 | 8 | ++++ |
| 93 | 8 | 1955 | 9 | ++++ |
| 93 | 8 | 1952 | 10 | ++++ |
| 93 | 8 | 1956 | 11 | +++ |
| 93 | 8 | 1953 | 12 | ++++ |
| 93 | 8 | 1957 | 13 | ++ |
| 93 | 8 | 1958 | 14 | ++ |
| 93 | 8 | 1959 | 15 | +++ |
| 93 | 8 | 1960 | 16 | + |
| 93 | 8 | 1961 | 17 | + |
| 94 | 10 | 1954 | 8 | ++++ |
| 94 | 10 | 1955 | 9 | ++++ |
| 94 | 10 | 1952 | 10 | ++++ |
| 94 | 10 | 1956 | 11 | ++ |
| 94 | 10 | 1953 | 12 | ++++ |
| 94 | 10 | 1957 | 13 | ++ |
| 94 | 10 | 1958 | 14 | +++ |
| 94 | 10 | 1959 | 15 | +++ |
| 94 | 10 | 1960 | 16 | + |
| 94 | 10 | 1961 | 17 | + |
| 95 | 13 | 1954 | 8 | ++++ |
| 95 | 13 | 1955 | 9 | +++ |
| 95 | 13 | 1952 | 10 | ++++ |
| 95 | 13 | 1956 | 11 | +++ |
| 95 | 13 | 1953 | 12 | ++++ |
| 95 | 13 | 1957 | 13 | ++ |
| 95 | 13 | 1958 | 14 | +++ |
| 95 | 13 | 1959 | 15 | +++ |
| 95 | 13 | 1960 | 16 | + |
| 95 | 13 | 1961 | 17 | + |
| 96 | 9 | 1954 | 8 | ++++ |
| 96 | 9 | 1955 | 9 | +++ |
| 96 | 9 | 1952 | 10 | +++ |
| 96 | 9 | 1956 | 11 | +++ |
| 96 | 9 | 1953 | 12 | ++++ |
| 96 | 9 | 1957 | 13 | ++ |
| 96 | 9 | 1958 | 14 | ++ |
| 96 | 9 | 1959 | 15 | +++ |
| 96 | 9 | 1960 | 16 | + |
| 96 | 9 | 1961 | 17 | + |
| 97 | 10 | 1954 | 8 | ++++ |
| 97 | 10 | 1955 | 9 | ++++ |
| 97 | 10 | 1952 | 10 | ++++ |
| 97 | 10 | 1956 | 11 | +++ |
| 97 | 10 | 1953 | 12 | ++++ |
| 97 | 10 | 1957 | 13 | ++ |
| 97 | 10 | 1958 | 14 | +++ |
| 97 | 10 | 1959 | 15 | +++ |
| 97 | 10 | 1960 | 16 | + |
| 97 | 10 | 1961 | 17 | + |
| 98 | 12 | 1954 | 8 | +++ |
| 98 | 12 | 1955 | 9 | +++ |
| 98 | 12 | 1952 | 10 | + |
| 98 | 12 | 1956 | 11 | + |
| 98 | 12 | 1953 | 12 | ++ |
| 98 | 12 | 1957 | 13 | + |
| 98 | 12 | 1958 | 14 | +++ |
| 98 | 12 | 1959 | 15 | + |
| 98 | 12 | 1960 | 16 | + |
| 98 | 12 | 1961 | 17 | + |
| 99 | 14 | 1954 | 8 | ++++ |
| 99 | 14 | 1955 | 9 | +++ |
| 99 | 14 | 1952 | 10 | +++ |
| 99 | 14 | 1956 | 11 | +++ |
| 99 | 14 | 1953 | 12 | +++ |
| 99 | 14 | 1957 | 13 | ++ |
| 99 | 14 | 1958 | 14 | ++ |
| 99 | 14 | 1959 | 15 | +++ |
| 99 | 14 | 1960 | 16 | + |
| 99 | 14 | 1961 | 17 | + |
| 100 | 15 | 1954 | 8 | ++++ |
| 100 | 15 | 1955 | 9 | ++++ |
| 100 | 15 | 1952 | 10 | ++++ |
| 100 | 15 | 1956 | 11 | +++ |
| 100 | 15 | 1953 | 12 | ++++ |
| 100 | 15 | 1957 | 13 | ++ |
| 100 | 15 | 1958 | 14 | ++ |
| 100 | 15 | 1959 | 15 | +++ |
| 100 | 15 | 1960 | 16 | + |
| 100 | 15 | 1961 | 17 | + |
| 101 | 16 | 1954 | 8 | + |
| 101 | 16 | 1955 | 9 | ++ |
| 101 | 16 | 1952 | 10 | + |
| 101 | 16 | 1956 | 11 | + |
| 101 | 16 | 1953 | 12 | ++ |
| 101 | 16 | 1957 | 13 | + |
| 101 | 16 | 1958 | 14 | + |
| 101 | 16 | 1959 | 15 | + |
| 101 | 16 | 1960 | 16 | + |
| 101 | 16 | 1961 | 17 | + |
| 102 | 17 | 1954 | 8 | +++ |
| 102 | 17 | 1955 | 9 | +++ |
| 102 | 17 | 1952 | 10 | +++ |
| 102 | 17 | 1956 | 11 | ++ |
| 102 | 17 | 1953 | 12 | +++ |
| 102 | 17 | 1957 | 13 | ++ |
| 102 | 17 | 1958 | 14 | ++ |
| 102 | 17 | 1959 | 15 | ++ |
| 102 | 17 | 1960 | 16 | + |
| 102 | 17 | 1961 | 17 | + |

### Example 7. Dual Prime Editing Assay for Additional RTT Sequences

[1309] For PEgRNAs that replace the CTG repeats with a complementarity region between the 3′ RTT and the 5′ RTT, different PEgRNA pairs were tested to examine the effect of complementarity region length and GC % on dual prime editing.

[1310] A HEK293T cell line was generated to stably express a transgene cassette driven by a promoter, and harbors from 5′ to 3′ a GFP open reading frame (ORF), a 1 kb random sequence, and a mcherry ORF. The 1 kb sequence contains multiple stop codons. Prior to editing, only the GFP is expressed. DMPK PEgRNA protospacer and PAM sequence were cloned at the ends flanking of the 1 kb random sequence. Successful prime editing with the DMPK pegRNAs would replace the 1 kb random sequence with the OD encoded by the PEgRNA RTT sequences, which would permit simultaneous expression of GFP and mcherry. FACS was used as the readout of editing efficiency, which is calculated as: (number of GFP+ and mcherry+ cells)/(number of GFP+ cells).

[1311] The results are summarized in Table 59. In Table 59, each row presents information for a pair of PEgRNAs (i.e., a 5′ PEgRNA and a 3′ PEgRNA) used in dual prime editing. Each PEgRNA is identified by a sequence identifier (“SEQ ID NO”). 5′ PEgRNAs having spacer No. 5 paired with 3′ PEgRNAs having spacer No. 3 were tested. All PEgRNAs had a PBS length of 12 nt. The RTT length in this experiment reflects the length of the region of complementarity between a 5′ RTT and a 3′RTT. Different lengths GC % of the region of complementarity were tested. The following scale was used for editing efficiency: PEgRNA pairs exhibiting editing efficiency above 0.9% and up to 5% are indicated with “+”, PEgRNA pairs exhibiting editing efficiency above 5% and up to 10% are indicated with “++”, PEgRNA pairs exhibiting editing efficiency above 10% and up to 15% are indicated with “+++”, and PEgRNA pairs exhibiting editing efficiency above 15% and up to 20% are indicated with “++++”.

TABLE 59
Dual prime editing pegRNAs in reporter cells

| 5′ PERNA | 3′ pegRNA | PEgRNA | | | |
|---|---|---|---|---|---|
| SEQ | SEQ | RTT | RTT | RTT | % editing |
| ID NO: | ID NO: | paring No. | length | GC % | efficiency |
| 3495 | 3496 | 1 | 38 | 0.63 | +++ |
| 103 | 1425 | 2 | 38 | 0.421052632 | ++ |
| 104 | 1426 | 3 | 38 | 0.421052632 | + |
| 105 | 1427 | 4 | 38 | 0.421052632 | + |
| 106 | 1428 | 5 | 38 | 0.421052632 | + |
| 107 | 1429 | 6 | 38 | 0.421052632 | ++ |
| 108 | 1430 | 7 | 38 | 0.421052632 | + |
| 109 | 1431 | 8 | 38 | 0.421052632 | + |
| 110 | 1432 | 9 | 38 | 0.421052632 | + |
| 111 | 1433 | 10 | 38 | 0.421052632 | ++ |
| 112 | 1434 | 11 | 38 | 0.526315789 | ++ |
| 113 | 1435 | 12 | 38 | 0.526315789 | ++ |
| 114 | 1436 | 13 | 38 | 0.526315789 | + |
| 115 | 1437 | 14 | 38 | 0.526315789 | ++ |
| 116 | 1438 | 15 | 38 | 0.526315789 | ++ |
| 117 | 1439 | 16 | 38 | 0.526315789 | ++ |
| 118 | 1440 | 17 | 38 | 0.526315789 | ++ |
| 119 | 1441 | 18 | 38 | 0.526315789 | ++ |
| 120 | 1442 | 19 | 38 | 0.526315789 | + |
| 121 | 1443 | 20 | 38 | 0.631578947 | ++ |
| 122 | 1444 | 21 | 38 | 0.631578947 | ++ |
| 123 | 1445 | 22 | 38 | 0.631578947 | + |
| 124 | 1446 | 23 | 38 | 0.631578947 | ++ |
| 125 | 1447 | 24 | 38 | 0.631578947 | +++ |
| 126 | 1448 | 25 | 38 | 0.631578947 | ++++ |
| 127 | 1449 | 26 | 38 | 0.631578947 | ++ |
| 128 | 1450 | 27 | 38 | 0.631578947 | +++ |
| 129 | 1451 | 28 | 38 | 0.631578947 | ++ |
| 130 | 1452 | 29 | 38 | 0.710526316 | ++ |
| 131 | 1453 | 30 | 38 | 0.710526316 | + |
| 132 | 1454 | 31 | 38 | 0.710526316 | ++ |
| 133 | 1455 | 32 | 38 | 0.710526316 | ++ |
| 134 | 1456 | 33 | 38 | 0.710526316 | ++++ |
| 135 | 1457 | 34 | 38 | 0.710526316 | +++ |
| 136 | 1458 | 35 | 38 | 0.710526316 | +++ |
| 137 | 1459 | 36 | 38 | 0.710526316 | ++ |
| 138 | 1460 | 37 | 38 | 0.710526316 | +++ |
| 139 | 1461 | 38 | 38 | 0.789473684 | ++ |
| 140 | 1462 | 39 | 38 | 0.789473684 | ++ |
| 141 | 1463 | 40 | 38 | 0.789473684 | ++ |
| 142 | 1464 | 41 | 38 | 0.789473684 | ++ |
| 143 | 1465 | 42 | 38 | 0.789473684 | +++ |
| 144 | 1466 | 43 | 38 | 0.789473684 | +++ |
| 145 | 1467 | 44 | 38 | 0.789473684 | ++ |
| 146 | 1468 | 45 | 38 | 0.789473684 | + |
| 147 | 1469 | 46 | 38 | 0.789473684 | +++ |
| 148 | 1470 | 47 | 23 | 0.652173913 | + |
| 149 | 1471 | 48 | 23 | 0.652173913 | +++ |
| 150 | 1472 | 49 | 23 | 0.652173913 | ++ |
| 151 | 1473 | 50 | 23 | 0.652173913 | ++ |
| 152 | 1474 | 51 | 23 | 0.652173913 | +++ |
| 153 | 1475 | 52 | 23 | 0.652173913 | +++ |
| 154 | 1476 | 53 | 23 | 0.652173913 | ++ |
| 155 | 1477 | 54 | 23 | 0.652173913 | ++++ |
| 156 | 1478 | 55 | 23 | 0.652173913 | + |
| 157 | 1479 | 56 | 53 | 0.622641509 | ++ |
| 158 | 1480 | 57 | 53 | 0.622641509 | ++ |
| 159 | 1481 | 58 | 53 | 0.622641509 | + |
| 160 | 1482 | 59 | 53 | 0.622641509 | ++ |
| 161 | 1483 | 60 | 68 | 0.632352941 | + |
| 162 | 1484 | 61 | 68 | 0.632352941 | + |
| 163 | 1485 | 62 | 68 | 0.632352941 | ++ |
| 164 | 1486 | 63 | 68 | 0.632352941 | + |
| 165 | 1487 | 64 | 68 | 0.632352941 | + |
| 166 | 1488 | 65 | 68 | 0.632352941 | ++ |
| 167 | 1489 | 66 | 68 | 0.632352941 | +++ |
| 168 | 1490 | 67 | 68 | 0.632352941 | + |
| 169 | 1491 | 68 | 68 | 0.632352941 | + |
| 170 | 1492 | 69 | 83 | 0.626506024 | + |
| 171 | 1493 | 70 | 83 | 0.626506024 | + |
| 172 | 1494 | 71 | 83 | 0.626506024 | ++ |
| 173 | 1495 | 72 | 83 | 0.626506024 | + |
| 174 | 1496 | 73 | 83 | 0.626506024 | + |
| 175 | 1497 | 74 | 83 | 0.626506024 | + |
| 176 | 1498 | 75 | 83 | 0.626506024 | ++ |
| 177 | 1499 | 76 | 83 | 0.626506024 | ++ |
| 178 | 1500 | 77 | 83 | 0.626506024 | ++ |
| 179 | 1501 | 78 | 83 | 0.626506024 | + |
| 180 | 1502 | 79 | 24 | 0.5 | + |

[1312] As shown in Table 59, successful dual prime editing was observed in all PEgRNA pairs tested. Specifically, the RTTs of each PEgRNA pair in rows 2-47 of Table 59 (RTT Paring No.s 1-46) have 38 base pairs of region of complementarity to each other, and the regions of complementarity have varying GC % as shown in Table 59. The RTTs of each PEgRNA pair in rows 48-79 of Table 59 (RTT Paring No.s 47-48) have a region of complementarity to each other, wherein the regions of complementarity have GC % of about 63%-65%, and have variant lengths as shown in Table 59. The median editing efficiency of fixed-length, varying GC % and fixed-GC %, varying length complementarity regions are further summarized in Table 60 below. Increased editing efficiency was observed for PEgRNA pairs that have regions of complementarity between RTTs that have 63%, 71%, or 79% of GC content (nearly double the median efficiency of PEgRNA pairs having RTT complementarity region having 42% GC), or PEgRNA pairs that have regions of complementarity between RTTs that are 23, 38, or 53 base pairs in length.

TABLE 60
Summary of median editing values of PEgRNA pairs.

| RTT length | RTT GC % | Median Editing efficiency |
|---|---|---|
| 38 | 42% | + |
| | 53% | ++ |
| | 63% | ++ |
| | 71% | ++ |
| | 79% | ++ |
| 23 | 63-65% | ++ |
| 53 | | ++ |
| 68 | | + |
| 83 | | + |

### Example 8. Dual Prime Editing pegRNAs in Single Prime Editing System

[1313] To assess the PEgRNAs' characteristics as independent guide RNAs for prime editing, 5′ and 3′ PEgRNAs designed for dual prime editing were tested for editing efficiency in a single prime editing system.

[1314] Single prime editing was performed using a lentiviral pooled screen assay, as described in Kim et al, 2021 (pubmed.ncbi.nlm.nih.gov/32958957/). Briefly, a lentiviral plasmid library was designed, with each library member harboring a sequence encoding a U6 promoter-driven PEgRNA and a target sequence corresponding to the protospacer, PAM and an editing target sequence having complementarity to the PEgRNA RTT. The library was transduced at low MOI (0.1-0.3) in HEK293T cells, resulting in random genomic integration of one copy of a target sequence and a pegRNA sequence in the vast majority of cells. Following puromycin selection for successful transduction, cells were transfected with polynucleotide encoding a prime editor fusion protein and incubated for 3 days. Following incubation, genomic DNA was extracted and analyzed by deep amplicon sequencing of the target site. Editing efficiency was evaluated by alignment rates to the edited and reference amplicons using CRISPresso2. Indel rates were aggregated from the reference and edited amplicons using a 17 bp window around the nick site.

[1315] PEgRNAs having 5′ spacer numbers 5, 18, and 11 and 3′ spacer numbers 5, 10, and 16, each having a designed RTT sequence having a specific length and GC % were designed. Each PEgRNA has a PBS of 10 nucleotides in length. The varying lengths and GC % of the RTT of each PEgRNA are shown in Tables 61-66. The single prime editing results are scaled as follows and summarized in Tables 61-66.

[1316] For each of Tables 61-66, the following scale was used for editing efficiency: PEgRNAs exhibiting editing efficiency of 0% are indicated with “−”, PEgRNAs exhibiting editing efficiency above 0% and up to 5% are indicated with “+”, PEgRNAs exhibiting editing efficiency above 5% and up to 10% are indicated with “++”, PEgRNAs exhibiting editing efficiency above 10% and up to 15% are indicated with “+++”, and PEgRNAs exhibiting editing efficiency above 15% and up to 35% are indicated with “++++”. The following scale was used for indel rates: PEgRNAs exhibiting indel rates of 0% are indicated with “−”, PEgRNAs exhibiting indel rates above 0% and up to 1% are indicated with “+”, PEgRNAs exhibiting indel rates above 1% and up to 10% are indicated with “++”, PEgRNAs exhibiting indel rates above 10% and up to 20% are indicated with “+++”, and PEgRNAs exhibiting indel rates above 20% and up to 75% are indicated with “++++”. The results show the PEgRNAs' ability to mediate prime editing in a single prime editing system, which indicate successful binding of the spacer to the search target sequence, and successful interaction among the PEgRNA components and with the Cas9 protein.

TABLE 61
dual prime editing pegRNAs tested with single prime editing system

| | pegRNA | RTT | | | | |
|---|---|---|---|---|---|---|
| 5′ | SEQ ID | paring | RTT | RTT | % editing | % indel |
| spacer | NO: | No. | length | GC % | efficiency | frequency |
| 5 | 181 | 260 | 25 | 0.48 | + | + |
| 5 | 182 | 92 | 30 | 0.5 | − | ++++ |
| 5 | 183 | 146 | 30 | 0.6 | − | − |
| 5 | 185 | 235 | 20 | 0.5 | ++ | ++ |
| 5 | 188 | 239 | 15 | 0.27 | ++ | ++ |
| 5 | 189 | 113 | 18 | 0.39 | ++ | ++ |
| 5 | 190 | 133 | 15 | 0.67 | +++ | + |
| 5 | 192 | 102 | 15 | 0.53 | ++ | + |
| 5 | 194 | 288 | 20 | 0.6 | ++ | + |
| 5 | 196 | 364 | 15 | 0.67 | + | + |
| 5 | 198 | 353 | 20 | 0.4 | ++ | ++ |
| 5 | 199 | 249 | 18 | 0.61 | + | ++ |
| 5 | 200 | 363 | 22 | 0.59 | + | − |
| 5 | 201 | 257 | 18 | 0.39 | + | ++ |
| 5 | 203 | 234 | 20 | 0.5 | ++++ | + |
| 5 | 204 | 135 | 20 | 0.85 | − | − |
| 5 | 205 | 192 | 28 | 0.5 | + | ++ |
| 5 | 206 | 282 | 18 | 0.72 | − | − |
| 5 | 208 | 270 | 20 | 0.6 | + | + |
| 5 | 209 | 318 | 10 | 0.8 | + | + |
| 5 | 211 | 350 | 22 | 0.41 | +++ | − |
| 5 | 212 | 132 | 15 | 0.4 | +++ | ++ |
| 5 | 213 | 315 | 22 | 0.5 | + | + |
| 5 | 214 | 370 | 22 | 0.41 | +++ | + |
| 5 | 215 | 366 | 25 | 0.4 | ++ | + |
| 5 | 217 | 221 | 28 | 0.29 | ++++ | − |
| 5 | 221 | 263 | 18 | 0.78 | − | ++++ |
| 5 | 222 | 369 | 25 | 0.64 | + | − |
| 5 | 223 | 180 | 25 | 0.48 | ++ | + |
| 5 | 226 | 287 | 15 | 0.67 | + | ++ |
| 5 | 227 | 170 | 15 | 0.53 | ++ | − |
| 5 | 228 | 323 | 30 | 0.5 | − | − |
| 5 | 229 | 381 | 40 | 0.4 | ++ | ++ |
| 5 | 231 | 149 | 10 | 0.9 | − | − |
| 5 | 232 | 104 | 30 | 0.4 | + | + |
| 5 | 235 | 103 | 10 | 0.5 | + | − |
| 5 | 236 | 215 | 18 | 0.72 | + | + |
| 5 | 238 | 138 | 18 | 0.39 | + | ++ |
| 5 | 239 | 356 | 28 | 0.5 | + | + |
| 5 | 240 | 305 | 22 | 0.59 | ++ | + |
| 5 | 241 | 266 | 20 | 0.8 | − | + |
| 5 | 242 | 142 | 22 | 0.82 | − | − |
| 5 | 243 | 218 | 15 | 0.93 | − | + |
| 5 | 248 | 303 | 18 | 0.83 | − | − |
| 5 | 249 | 211 | 15 | 0.87 | − | − |
| 5 | 252 | 209 | 18 | 0.78 | + | − |
| 5 | 255 | 373 | 20 | 0.75 | − | ++ |
| 5 | 256 | 157 | 10 | 0.8 | + | ++ |
| 5 | 259 | 151 | 15 | 0.93 | − | − |
| 5 | 263 | 322 | 40 | 0.6 | − | ++ |
| 5 | 266 | 172 | 20 | 0.65 | − | ++ |
| 5 | 268 | 205 | 10 | 0.8 | + | + |
| 5 | 269 | 124 | 28 | 0.61 | + | ++ |
| 5 | 272 | 219 | 18 | 0.61 | + | − |
| 5 | 273 | 213 | 15 | 0.93 | + | + |
| 5 | 280 | 383 | 28 | 0.5 | + | + |
| 5 | 281 | 293 | 18 | 0.89 | − | − |
| 5 | 283 | 188 | 22 | 0.68 | − | +++ |
| 5 | 285 | 179 | 15 | 0.73 | + | ++ |
| 5 | 286 | 181 | 10 | 0.8 | − | + |
| 5 | 290 | 375 | 18 | 0.67 | + | − |
| 5 | 294 | 155 | 20 | 0.75 | + | − |
| 5 | 295 | 128 | 20 | 0.6 | + | − |
| 5 | 296 | 175 | 25 | 0.64 | − | − |
| 5 | 297 | 243 | 18 | 0.67 | + | + |
| 5 | 299 | 307 | 20 | 0.65 | + | − |
| 5 | 300 | 329 | 15 | 0.67 | + | + |
| 5 | 301 | 286 | 30 | 0.5 | + | ++ |
| 5 | 302 | 145 | 10 | 0.6 | + | + |
| 5 | 304 | 290 | 20 | 0.7 | + | ++ |
| 5 | 305 | 321 | 10 | 0.8 | + | ++ |
| 5 | 306 | 186 | 20 | 0.3 | + | − |
| 5 | 308 | 283 | 18 | 0.67 | ++ | ++ |
| 5 | 309 | 384 | 10 | 0.5 | + | + |
| 5 | 310 | 223 | 15 | 0.8 | + | ++ |
| 5 | 312 | 361 | 15 | 0.6 | + | − |
| 5 | 313 | 216 | 25 | 0.6 | − | + |
| 5 | 314 | 278 | 20 | 0.5 | + | ++ |
| 5 | 315 | 246 | 15 | 0.6 | + | ++ |
| 5 | 316 | 291 | 28 | 0.64 | − | − |
| 5 | 318 | 229 | 10 | 0.6 | + | + |
| 5 | 319 | 184 | 15 | 0.73 | + | − |
| 5 | 320 | 169 | 10 | 0.9 | + | + |
| 5 | 322 | 161 | 20 | 0.85 | + | ++ |
| 5 | 325 | 379 | 10 | 0.6 | + | ++ |
| 5 | 327 | 137 | 15 | 0.67 | + | − |
| 5 | 328 | 231 | 22 | 0.64 | − | ++++ |
| 5 | 330 | 190 | 15 | 0.87 | − | + |
| 5 | 332 | 166 | 18 | 0.78 | + | ++ |
| 5 | 333 | 141 | 10 | 0.7 | + | − |
| 5 | 335 | 348 | 20 | 0.8 | − | − |
| 5 | 344 | 140 | 18 | 0.89 | − | − |
| 5 | 346 | 376 | 22 | 0.5 | ++ | ++ |
| 5 | 347 | 269 | 15 | 0.87 | − | − |
| 5 | 349 | 131 | 22 | 0.59 | + | + |
| 5 | 350 | 312 | 18 | 0.83 | + | ++ |
| 5 | 353 | 280 | 15 | 0.6 | + | ++ |
| 5 | 354 | 125 | 22 | 0.64 | − | − |
| 5 | 355 | 334 | 18 | 0.78 | − | ++ |
| 5 | 356 | 232 | 28 | 0.61 | − | − |
| 5 | 358 | 355 | 35 | 0.4 | + | ++ |
| 5 | 360 | 325 | 15 | 0.4 | + | + |
| 5 | 362 | 139 | 25 | 0.72 | − | − |
| 5 | 364 | 114 | 18 | 0.78 | + | ++ |
| 5 | 369 | 108 | 10 | 0.7 | + | + |
| 5 | 373 | 349 | 23 | 0.65 | ++ | + |
| 5 | 374 | 330 | 30 | 0.4 | ++ | − |
| 5 | 375 | 119 | 30 | 0.4 | ++++ | − |
| 5 | 376 | 252 | 35 | 0.51 | + | + |
| 5 | 379 | 241 | 10 | 0.6 | + | ++ |
| 5 | 380 | 338 | 20 | 0.4 | ++++ | + |
| 5 | 381 | 115 | 15 | 0.67 | + | ++ |
| 5 | 387 | 107 | 15 | 0.4 | ++ | ++ |
| 5 | 389 | 127 | 22 | 0.5 | ++ | ++ |
| 5 | 390 | 253 | 30 | 0.3 | ++ | ++ |
| 5 | 391 | 80 | 18 | 0.28 | +++ | ++ |
| 5 | 392 | 197 | 18 | 0.83 | − | + |
| 5 | 393 | 371 | 40 | 0.3 | ++ | − |
| 5 | 394 | 111 | 35 | 0.4 | + | ++ |
| 5 | 395 | 228 | 28 | 0.39 | ++ | + |
| 5 | 396 | 367 | 22 | 0.32 | ++ | ++ |
| 5 | 397 | 251 | 35 | 0.29 | ++ | − |
| 5 | 398 | 292 | 30 | 0.7 | − | − |
| 5 | 401 | 225 | 22 | 0.64 | + | + |
| 5 | 403 | 159 | 20 | 0.65 | + | − |
| 5 | 404 | 116 | 18 | 0.72 | − | − |
| 5 | 406 | 279 | 15 | 0.53 | + | − |
| 5 | 407 | 337 | 28 | 0.39 | ++++ | ++ |
| 5 | 408 | 91 | 18 | 0.61 | +++ | ++ |
| 5 | 409 | 83 | 25 | 0.4 | ++++ | + |
| 5 | 410 | 240 | 25 | 0.32 | ++ | − |
| 5 | 411 | 345 | 15 | 0.8 | + | ++ |
| 5 | 412 | 220 | 25 | 0.6 | ++ | + |
| 5 | 413 | 106 | 15 | 0.8 | + | ++ |
| 5 | 414 | 182 | 20 | 0.7 | − | − |
| 5 | 415 | 183 | 15 | 0.73 | − | ++ |
| 5 | 416 | 331 | 25 | 0.48 | + | − |
| 5 | 419 | 242 | 18 | 0.5 | ++ | ++ |
| 5 | 420 | 150 | 20 | 0.7 | + | + |
| 5 | 421 | 158 | 25 | 0.6 | − | + |
| 5 | 422 | 174 | 10 | 0.8 | − | + |
| 5 | 423 | 327 | 20 | 0.8 | − | − |
| 5 | 424 | 99 | 35 | 0.51 | − | +++ |
| 5 | 426 | 185 | 25 | 0.4 | + | + |
| 5 | 427 | 227 | 28 | 0.39 | + | + |
| 5 | 429 | 341 | 18 | 0.5 | + | − |
| 5 | 430 | 339 | 35 | 0.4 | ++ | ++ |
| 5 | 432 | 324 | 18 | 0.5 | ++ | ++ |
| 5 | 433 | 342 | 22 | 0.41 | ++++ | + |
| 5 | 434 | 87 | 20 | 0.4 | +++ | + |
| 11 | 609 | 119 | 30 | 0.4 | + | + |
| 11 | 611 | 124 | 28 | 0.61 | − | − |
| 11 | 612 | 125 | 22 | 0.64 | − | − |
| 11 | 613 | 127 | 22 | 0.5 | + | − |
| 11 | 615 | 128 | 20 | 0.6 | + | − |
| 11 | 616 | 83 | 25 | 0.4 | + | − |
| 11 | 617 | 131 | 22 | 0.59 | − | − |
| 11 | 618 | 132 | 15 | 0.4 | − | ++ |
| 11 | 619 | 133 | 15 | 0.67 | − | − |
| 11 | 623 | 137 | 15 | 0.67 | − | ++ |
| 11 | 624 | 138 | 18 | 0.39 | − | − |
| 11 | 625 | 139 | 25 | 0.72 | − | − |
| 11 | 627 | 141 | 10 | 0.7 | + | − |
| 11 | 629 | 143 | 22 | 0.86 | − | − |
| 11 | 630 | 145 | 10 | 0.6 | − | ++ |
| 11 | 635 | 150 | 20 | 0.7 | + | ++ |
| 11 | 636 | 151 | 15 | 0.93 | − | − |
| 11 | 640 | 155 | 20 | 0.75 | − | − |
| 11 | 643 | 158 | 25 | 0.6 | − | + |
| 11 | 644 | 159 | 20 | 0.65 | + | − |
| 11 | 646 | 161 | 20 | 0.85 | − | ++ |
| 11 | 654 | 169 | 10 | 0.9 | − | − |
| 11 | 655 | 170 | 15 | 0.53 | − | − |
| 11 | 657 | 172 | 20 | 0.65 | − | − |
| 11 | 659 | 174 | 10 | 0.8 | − | ++ |
| 11 | 664 | 87 | 20 | 0.4 | − | − |
| 11 | 665 | 179 | 15 | 0.73 | − | − |
| 11 | 666 | 180 | 25 | 0.48 | + | ++ |
| 11 | 667 | 181 | 10 | 0.8 | − | − |
| 11 | 668 | 182 | 20 | 0.7 | − | − |
| 11 | 669 | 183 | 15 | 0.73 | − | + |
| 11 | 670 | 184 | 15 | 0.73 | − | ++ |
| 11 | 671 | 185 | 25 | 0.4 | − | − |
| 11 | 672 | 186 | 20 | 0.3 | + | − |
| 11 | 673 | 188 | 22 | 0.68 | − | − |
| 11 | 675 | 190 | 15 | 0.87 | − | − |
| 11 | 677 | 192 | 28 | 0.5 | − | − |
| 11 | 682 | 198 | 20 | 0.9 | − | − |
| 11 | 688 | 205 | 10 | 0.8 | − | − |
| 11 | 692 | 209 | 18 | 0.78 | − | ++ |
| 11 | 695 | 92 | 30 | 0.5 | − | + |
| 11 | 699 | 215 | 18 | 0.72 | + | − |
| 11 | 700 | 216 | 25 | 0.6 | − | + |
| 11 | 703 | 219 | 18 | 0.61 | − | − |
| 11 | 704 | 220 | 25 | 0.6 | + | + |
| 11 | 705 | 221 | 28 | 0.29 | + | ++ |
| 11 | 707 | 223 | 15 | 0.8 | + | − |
| 11 | 708 | 225 | 22 | 0.64 | + | − |
| 11 | 710 | 227 | 28 | 0.39 | + | ++ |
| 11 | 711 | 228 | 28 | 0.39 | + | ++ |
| 11 | 712 | 229 | 10 | 0.6 | − | − |
| 11 | 715 | 232 | 28 | 0.61 | + | ++ |
| 11 | 717 | 234 | 20 | 0.5 | + | − |
| 11 | 718 | 235 | 20 | 0.5 | + | + |
| 11 | 722 | 239 | 15 | 0.27 | − | − |
| 11 | 723 | 240 | 25 | 0.32 | + | − |
| 11 | 724 | 241 | 10 | 0.6 | − | − |
| 11 | 725 | 242 | 18 | 0.5 | − | − |
| 11 | 726 | 243 | 18 | 0.67 | − | − |
| 11 | 729 | 246 | 15 | 0.6 | − | − |
| 11 | 730 | 249 | 18 | 0.61 | − | − |
| 11 | 731 | 251 | 35 | 0.29 | + | − |
| 11 | 733 | 253 | 30 | 0.3 | + | + |
| 11 | 737 | 257 | 18 | 0.39 | − | ++ |
| 11 | 739 | 260 | 25 | 0.48 | + | − |
| 11 | 746 | 266 | 20 | 0.8 | − | − |
| 11 | 750 | 270 | 20 | 0.6 | − | − |
| 11 | 758 | 278 | 20 | 0.5 | + | ++ |
| 11 | 759 | 279 | 15 | 0.53 | − | ++ |
| 11 | 760 | 280 | 15 | 0.6 | − | − |
| 11 | 763 | 283 | 18 | 0.67 | − | − |
| 11 | 766 | 286 | 30 | 0.5 | − | ++ |
| 11 | 768 | 287 | 15 | 0.67 | − | − |
| 11 | 769 | 288 | 20 | 0.6 | + | ++ |
| 11 | 771 | 290 | 20 | 0.7 | + | ++ |
| 11 | 773 | 292 | 30 | 0.7 | − | − |
| 11 | 785 | 305 | 22 | 0.59 | + | − |
| 11 | 786 | 102 | 15 | 0.53 | − | − |
| 11 | 787 | 307 | 20 | 0.65 | + | + |
| 11 | 793 | 315 | 22 | 0.5 | + | +++ |
| 11 | 795 | 318 | 10 | 0.8 | − | − |
| 11 | 796 | 321 | 10 | 0.8 | − | − |
| 11 | 797 | 322 | 40 | 0.6 | − | − |
| 11 | 801 | 327 | 20 | 0.8 | − | − |
| 11 | 803 | 330 | 30 | 0.4 | + | − |
| 11 | 804 | 331 | 25 | 0.48 | + | ++ |
| 11 | 806 | 103 | 10 | 0.5 | − | − |
| 11 | 807 | 80 | 18 | 0.28 | − | ++ |
| 11 | 809 | 334 | 18 | 0.78 | − | ++++ |
| 11 | 812 | 337 | 28 | 0.39 | − | − |
| 11 | 813 | 338 | 20 | 0.4 | + | ++ |
| 11 | 814 | 339 | 35 | 0.4 | + | − |
| 11 | 815 | 104 | 30 | 0.4 | − | ++ |
| 11 | 816 | 341 | 18 | 0.5 | + | ++ |
| 11 | 817 | 342 | 22 | 0.41 | + | − |
| 11 | 823 | 348 | 20 | 0.8 | − | ++ |
| 11 | 824 | 349 | 23 | 0.65 | − | − |
| 11 | 826 | 350 | 22 | 0.41 | + | − |
| 11 | 828 | 353 | 20 | 0.4 | − | ++ |
| 11 | 829 | 355 | 35 | 0.4 | + | − |
| 11 | 830 | 356 | 28 | 0.5 | − | + |
| 11 | 837 | 363 | 22 | 0.59 | + | ++ |
| 11 | 838 | 107 | 15 | 0.4 | + | − |
| 11 | 841 | 366 | 25 | 0.4 | + | ++ |
| 11 | 842 | 367 | 22 | 0.32 | + | ++ |
| 11 | 843 | 108 | 10 | 0.7 | − | ++ |
| 11 | 844 | 369 | 25 | 0.64 | + | ++ |
| 11 | 845 | 370 | 22 | 0.41 | + | ++ |
| 11 | 846 | 371 | 40 | 0.3 | + | − |
| 11 | 848 | 373 | 20 | 0.75 | − | − |
| 11 | 849 | 374 | 28 | 0.61 | − | ++ |
| 11 | 851 | 376 | 22 | 0.5 | + | − |
| 11 | 854 | 381 | 40 | 0.4 | + | − |
| 11 | 855 | 383 | 28 | 0.5 | − | − |
| 11 | 856 | 384 | 10 | 0.5 | − | − |
| 11 | 857 | 111 | 35 | 0.4 | + | ++ |
| 11 | 860 | 115 | 15 | 0.67 | − | − |
| 18 | 1038 | 119 | 30 | 0.4 | + | + |
| 18 | 1040 | 124 | 28 | 0.61 | − | − |
| 18 | 1041 | 125 | 22 | 0.64 | − | − |
| 18 | 1042 | 127 | 22 | 0.5 | +++ | − |
| 18 | 1045 | 83 | 25 | 0.4 | +++ | + |
| 18 | 1046 | 131 | 22 | 0.59 | − | − |
| 18 | 1047 | 132 | 15 | 0.4 | + | + |
| 18 | 1048 | 133 | 15 | 0.67 | − | + |
| 18 | 1049 | 134 | 28 | 0.64 | − | − |
| 18 | 1052 | 137 | 15 | 0.67 | + | + |
| 18 | 1053 | 138 | 18 | 0.39 | ++ | − |
| 18 | 1056 | 141 | 10 | 0.7 | + | + |
| 18 | 1057 | 142 | 22 | 0.82 | − | − |
| 18 | 1059 | 145 | 10 | 0.6 | ++ | − |
| 18 | 1060 | 146 | 30 | 0.6 | − | − |
| 18 | 1063 | 149 | 10 | 0.9 | + | − |
| 18 | 1064 | 150 | 20 | 0.7 | − | − |
| 18 | 1065 | 151 | 15 | 0.93 | − | + |
| 18 | 1068 | 154 | 22 | 0.73 | − | − |
| 18 | 1069 | 155 | 20 | 0.75 | − | − |
| 18 | 1071 | 157 | 10 | 0.8 | + | − |
| 18 | 1072 | 158 | 25 | 0.6 | − | − |
| 18 | 1073 | 159 | 20 | 0.65 | ++++ | − |
| 18 | 1075 | 161 | 20 | 0.85 | − | ++ |
| 18 | 1080 | 166 | 18 | 0.78 | − | − |
| 18 | 1083 | 169 | 10 | 0.9 | + | + |
| 18 | 1084 | 170 | 15 | 0.53 | + | − |
| 18 | 1086 | 172 | 20 | 0.65 | − | − |
| 18 | 1088 | 174 | 10 | 0.8 | + | − |
| 18 | 1089 | 175 | 25 | 0.64 | − | − |
| 18 | 1093 | 87 | 20 | 0.4 | ++ | − |
| 18 | 1094 | 179 | 15 | 0.73 | − | − |
| 18 | 1095 | 180 | 25 | 0.48 | + | ++ |
| 18 | 1096 | 181 | 10 | 0.8 | − | + |
| 18 | 1097 | 182 | 20 | 0.7 | − | ++ |
| 18 | 1098 | 183 | 15 | 0.73 | − | − |
| 18 | 1099 | 184 | 15 | 0.73 | + | + |
| 18 | 1100 | 185 | 25 | 0.4 | + | ++ |
| 18 | 1101 | 186 | 20 | 0.3 | ++ | − |
| 18 | 1102 | 188 | 22 | 0.68 | − | − |
| 18 | 1104 | 190 | 15 | 0.87 | − | − |
| 18 | 1106 | 192 | 28 | 0.5 | − | ++++ |
| 18 | 1110 | 197 | 18 | 0.83 | − | − |
| 18 | 1117 | 205 | 10 | 0.8 | + | +++ |
| 18 | 1119 | 91 | 18 | 0.61 | + | ++ |
| 18 | 1121 | 209 | 18 | 0.78 | − | +++ |
| 18 | 1123 | 211 | 15 | 0.87 | + | − |
| 18 | 1126 | 213 | 15 | 0.93 | + | + |
| 18 | 1128 | 215 | 18 | 0.72 | − | ++ |
| 18 | 1131 | 218 | 15 | 0.93 | − | − |
| 18 | 1132 | 219 | 18 | 0.61 | + | − |
| 18 | 1133 | 220 | 25 | 0.6 | + | ++ |
| 18 | 1134 | 221 | 28 | 0.29 | ++ | + |
| 18 | 1136 | 223 | 15 | 0.8 | + | + |
| 18 | 1137 | 225 | 22 | 0.64 | − | − |
| 18 | 1139 | 227 | 28 | 0.39 | + | − |
| 18 | 1140 | 228 | 28 | 0.39 | ++ | + |
| 18 | 1141 | 229 | 10 | 0.6 | ++ | − |
| 18 | 1144 | 232 | 28 | 0.61 | + | − |
| 18 | 1146 | 234 | 20 | 0.5 | +++ | + |
| 18 | 1147 | 235 | 20 | 0.5 | + | + |
| 18 | 1151 | 239 | 15 | 0.27 | ++ | − |
| 18 | 1152 | 240 | 25 | 0.32 | +++ | − |
| 18 | 1153 | 241 | 10 | 0.6 | + | − |
| 18 | 1154 | 242 | 18 | 0.5 | + | ++ |
| 18 | 1155 | 243 | 18 | 0.67 | + | + |
| 18 | 1156 | 244 | 30 | 0.73 | + | − |
| 18 | 1158 | 246 | 15 | 0.6 | + | − |
| 18 | 1159 | 249 | 18 | 0.61 | − | − |
| 18 | 1160 | 251 | 35 | 0.29 | ++ | ++ |
| 18 | 1162 | 253 | 30 | 0.3 | +++ | ++ |
| 18 | 1166 | 257 | 18 | 0.39 | + | + |
| 18 | 1168 | 260 | 25 | 0.48 | + | + |
| 18 | 1175 | 266 | 20 | 0.8 | − | − |
| 18 | 1178 | 269 | 15 | 0.87 | − | − |
| 18 | 1179 | 270 | 20 | 0.6 | − | +++ |
| 18 | 1187 | 278 | 20 | 0.5 | + | + |
| 18 | 1188 | 279 | 15 | 0.53 | + | − |
| 18 | 1189 | 280 | 15 | 0.6 | + | − |
| 18 | 1192 | 283 | 18 | 0.67 | + | + |
| 18 | 1195 | 286 | 30 | 0.5 | − | − |
| 18 | 1197 | 287 | 15 | 0.67 | + | ++ |
| 18 | 1198 | 288 | 20 | 0.6 | ++ | − |
| 18 | 1200 | 290 | 20 | 0.7 | + | ++ |
| 18 | 1202 | 292 | 30 | 0.7 | − | − |
| 18 | 1203 | 293 | 18 | 0.89 | − | − |
| 18 | 1214 | 305 | 22 | 0.59 | + | ++ |
| 18 | 1215 | 102 | 15 | 0.53 | + | − |
| 18 | 1216 | 307 | 20 | 0.65 | + | − |
| 18 | 1220 | 312 | 18 | 0.83 | − | ++ |
| 18 | 1222 | 315 | 22 | 0.5 | ++ | ++ |
| 18 | 1224 | 318 | 10 | 0.8 | + | ++ |
| 18 | 1225 | 321 | 10 | 0.8 | + | − |
| 18 | 1228 | 324 | 18 | 0.5 | + | + |
| 18 | 1229 | 325 | 15 | 0.4 | ++ | ++ |
| 18 | 1231 | 329 | 15 | 0.67 | + | ++ |
| 18 | 1232 | 330 | 30 | 0.4 | + | − |
| 18 | 1233 | 331 | 25 | 0.48 | + | + |
| 18 | 1235 | 103 | 10 | 0.5 | + | − |
| 18 | 1236 | 80 | 18 | 0.28 | ++ | − |
| 18 | 1238 | 334 | 18 | 0.78 | − | ++ |
| 18 | 1241 | 337 | 28 | 0.39 | + | + |
| 18 | 1242 | 338 | 20 | 0.4 | + | ++ |
| 18 | 1243 | 339 | 35 | 0.4 | + | ++ |
| 18 | 1244 | 104 | 30 | 0.4 | − | − |
| 18 | 1245 | 341 | 18 | 0.5 | + | − |
| 18 | 1246 | 342 | 22 | 0.41 | ++ | ++ |
| 18 | 1249 | 345 | 15 | 0.8 | − | − |
| 18 | 1253 | 349 | 23 | 0.65 | + | + |
| 18 | 1254 | 106 | 15 | 0.8 | − | − |
| 18 | 1255 | 350 | 22 | 0.41 | ++ | − |
| 18 | 1257 | 353 | 20 | 0.4 | + | ++ |
| 18 | 1258 | 355 | 35 | 0.4 | − | ++ |
| 18 | 1259 | 356 | 28 | 0.5 | + | − |
| 18 | 1262 | 359 | 22 | 0.68 | − | ++ |
| 18 | 1264 | 361 | 15 | 0.6 | + | + |
| 18 | 1266 | 363 | 22 | 0.59 | − | − |
| 18 | 1267 | 107 | 15 | 0.4 | ++ | − |
| 18 | 1268 | 364 | 15 | 0.67 | + | − |
| 18 | 1270 | 366 | 25 | 0.4 | + | ++ |
| 18 | 1271 | 367 | 22 | 0.32 | + | + |
| 18 | 1272 | 108 | 10 | 0.7 | + | ++ |
| 18 | 1273 | 369 | 25 | 0.64 | + | ++ |
| 18 | 1274 | 370 | 22 | 0.41 | +++ | +++ |
| 18 | 1275 | 371 | 40 | 0.3 | + | − |
| 18 | 1277 | 373 | 20 | 0.75 | − | + |
| 18 | 1279 | 375 | 18 | 0.67 | + | ++ |
| 18 | 1280 | 376 | 22 | 0.5 | ++ | + |
| 18 | 1282 | 379 | 10 | 0.6 | + | − |
| 18 | 1283 | 381 | 40 | 0.4 | + | − |
| 18 | 1284 | 383 | 28 | 0.5 | + | ++ |
| 18 | 1285 | 384 | 10 | 0.5 | + | − |
| 18 | 1286 | 111 | 35 | 0.4 | + | − |
| 18 | 1287 | 113 | 18 | 0.39 | ++ | − |
| 18 | 1288 | 114 | 18 | 0.78 | − | − |
| 18 | 1289 | 115 | 15 | 0.67 | ++ | − |

TABLE 62
dual prime editing pegRNAs tested with single prime editing system

| | pegRNA | RTT | | | | |
|---|---|---|---|---|---|---|
| 5′ | SEQ ID | pairing | RTT | RTT | % editing | % indel |
| spacer | NO: | No. | length | GC % | efficiency | frequency |
| 5 | 436 | 306 | 20 | 0.7 | + | + |
| 5 | 436 | 306 | 20 | 0.7 | + | ++ |
| 5 | 438 | 112 | 15 | 0.67 | ++ | ++ |
| 5 | 438 | 112 | 15 | 0.67 | + | ++ |
| 5 | 439 | 109 | 20 | 0.4 | ++++ | ++ |
| 5 | 440 | 320 | 15 | 0.67 | + | − |
| 5 | 441 | 368 | 20 | 0.5 | ++ | − |
| 5 | 442 | 382 | 20 | 0.4 | + | ++ |
| 5 | 442 | 382 | 20 | 0.4 | ++ | ++ |
| 5 | 446 | 85 | 15 | 0.8 | − | +++ |
| 5 | 446 | 85 | 15 | 0.8 | − | − |
| 5 | 447 | 351 | 25 | 0.48 | + | + |
| 5 | 448 | 121 | 20 | 0.5 | +++ | + |
| 5 | 449 | 86 | 25 | 0.48 | + | + |
| 5 | 449 | 86 | 25 | 0.48 | + | ++ |
| 5 | 450 | 90 | 20 | 0.8 | + | ++ |
| 5 | 450 | 90 | 20 | 0.8 | + | ++ |
| 5 | 450 | 90 | 20 | 0.8 | + | − |
| 5 | 451 | 300 | 25 | 0.6 | + | + |
| 5 | 454 | 378 | 15 | 0.8 | − | − |
| 5 | 456 | 123 | 20 | 0.6 | ++ | ++ |
| 5 | 456 | 123 | 20 | 0.6 | ++ | + |
| 5 | 456 | 123 | 20 | 0.6 | + | ++ |
| 5 | 457 | 110 | 20 | 0.7 | − | − |
| 5 | 459 | 380 | 20 | 0.5 | ++ | ++ |
| 5 | 460 | 89 | 25 | 0.4 | + | ++ |
| 5 | 460 | 89 | 25 | 0.4 | + | − |
| 5 | 461 | 247 | 25 | 0.4 | + | − |
| 5 | 462 | 88 | 30 | 0.4 | +++ | + |
| 5 | 462 | 88 | 30 | 0.4 | +++ | − |
| 5 | 462 | 88 | 30 | 0.4 | ++ | + |
| 5 | 463 | 354 | 15 | 0.4 | +++ | + |
| 5 | 464 | 130 | 30 | 0.5 | + | − |
| 5 | 464 | 130 | 30 | 0.5 | + | ++ |
| 5 | 464 | 130 | 30 | 0.5 | + | − |
| 5 | 465 | 81 | 15 | 0.4 | ++++ | − |
| 5 | 466 | 122 | 15 | 0.4 | ++++ | + |
| 5 | 467 | 129 | 15 | 0.53 | +++ | + |
| 5 | 467 | 129 | 15 | 0.53 | ++ | + |
| 5 | 467 | 129 | 15 | 0.53 | ++ | + |
| 5 | 468 | 96 | 15 | 0.6 | ++ | ++ |
| 5 | 468 | 96 | 15 | 0.6 | ++ | + |
| 5 | 468 | 96 | 15 | 0.6 | +++ | + |
| 11 | 863 | 84 | 25 | 0.6 | − | − |
| 11 | 865 | 86 | 25 | 0.48 | − | ++ |
| 11 | 866 | 89 | 25 | 0.4 | − | ++ |
| 11 | 867 | 90 | 20 | 0.8 | − | + |
| 11 | 870 | 96 | 15 | 0.6 | − | − |
| 11 | 870 | 96 | 15 | 0.6 | + | ++ |
| 11 | 872 | 109 | 20 | 0.4 | + | − |
| 11 | 873 | 112 | 15 | 0.67 | − | − |
| 11 | 873 | 112 | 15 | 0.67 | + | − |
| 11 | 874 | 122 | 15 | 0.4 | + | ++ |
| 11 | 875 | 126 | 15 | 0.4 | − | +++ |
| 11 | 876 | 129 | 15 | 0.53 | − | ++ |
| 11 | 876 | 129 | 15 | 0.53 | − | − |
| 11 | 876 | 129 | 15 | 0.53 | − | − |
| 11 | 878 | 144 | 30 | 0.4 | + | + |
| 11 | 880 | 206 | 30 | 0.4 | + | + |
| 11 | 880 | 206 | 30 | 0.4 | + | + |
| 11 | 882 | 247 | 25 | 0.4 | − | ++ |
| 11 | 883 | 250 | 15 | 0.6 | − | − |
| 11 | 884 | 272 | 25 | 0.6 | − | − |
| 11 | 886 | 306 | 20 | 0.7 | − | − |
| 11 | 886 | 306 | 20 | 0.7 | + | ++ |
| 11 | 886 | 306 | 20 | 0.7 | − | − |
| 11 | 889 | 319 | 20 | 0.6 | − | − |
| 11 | 889 | 319 | 20 | 0.6 | − | − |
| 11 | 889 | 319 | 20 | 0.6 | − | ++ |
| 11 | 890 | 320 | 15 | 0.67 | − | − |
| 11 | 892 | 340 | 25 | 0.4 | + | ++ |
| 11 | 893 | 351 | 25 | 0.48 | + | − |
| 11 | 893 | 351 | 25 | 0.48 | + | − |
| 11 | 894 | 354 | 15 | 0.4 | − | − |
| 11 | 895 | 368 | 20 | 0.5 | + | − |
| 11 | 895 | 368 | 20 | 0.5 | + | + |
| 11 | 895 | 368 | 20 | 0.5 | − | − |
| 11 | 896 | 382 | 20 | 0.4 | + | + |
| 11 | 896 | 382 | 20 | 0.4 | + | − |
| 18 | 1292 | 85 | 15 | 0.8 | + | − |
| 18 | 1293 | 86 | 25 | 0.48 | − | − |
| 18 | 1294 | 88 | 30 | 0.4 | + | + |
| 18 | 1295 | 89 | 25 | 0.4 | − | ++ |
| 18 | 1295 | 89 | 25 | 0.4 | + | − |
| 18 | 1296 | 90 | 20 | 0.8 | − | ++ |
| 18 | 1296 | 90 | 20 | 0.8 | − | − |
| 18 | 1299 | 96 | 15 | 0.6 | + | − |
| 18 | 1299 | 96 | 15 | 0.6 | + | − |
| 18 | 1299 | 96 | 15 | 0.6 | + | ++ |
| 18 | 1300 | 105 | 15 | 0.8 | − | − |
| 18 | 1301 | 109 | 20 | 0.4 | +++ | ++ |
| 18 | 1303 | 112 | 15 | 0.67 | + | − |
| 18 | 1303 | 112 | 15 | 0.67 | + | ++ |
| 18 | 1304 | 122 | 15 | 0.4 | ++ | ++ |
| 18 | 1304 | 122 | 15 | 0.4 | +++ | ++ |
| 18 | 1305 | 123 | 20 | 0.6 | − | ++ |
| 18 | 1306 | 126 | 15 | 0.4 | ++ | + |
| 18 | 1307 | 129 | 15 | 0.53 | +++ | ++ |
| 18 | 1307 | 129 | 15 | 0.53 | ++ | ++ |
| 18 | 1307 | 129 | 15 | 0.53 | ++ | ++ |
| 18 | 1308 | 130 | 30 | 0.5 | − | − |
| 18 | 1308 | 130 | 30 | 0.5 | − | ++ |
| 18 | 1308 | 130 | 30 | 0.5 | − | − |
| 18 | 1311 | 247 | 25 | 0.4 | + | ++ |
| 18 | 1313 | 259 | 30 | 0.4 | − | − |
| 18 | 1315 | 300 | 25 | 0.6 | − | ++ |
| 18 | 1316 | 306 | 20 | 0.7 | + | − |
| 18 | 1320 | 320 | 15 | 0.67 | + | − |
| 18 | 1322 | 351 | 25 | 0.48 | + | ++ |
| 18 | 1323 | 378 | 15 | 0.8 | − | − |
| 18 | 1324 | 380 | 20 | 0.5 | + | − |
| 18 | 1324 | 380 | 20 | 0.5 | + | − |
| 18 | 1324 | 380 | 20 | 0.5 | + | − |
| 18 | 1325 | 382 | 20 | 0.4 | +++ | − |
| 18 | 1325 | 382 | 20 | 0.4 | + | ++ |

TABLE 63
dual prime editing pegRNAs tested with single prime editing system

| | pegRNA | RTT | | | | |
|---|---|---|---|---|---|---|
| 5′ | SEQ ID | pairing | RTT | | % editing | % indel |
| spacer | NO: | No. | length | RTT GC % | efficiency | frequency |
| 5 | 469 | 387 | 12 | 0.666666667 | + | + |
| 5 | 470 | 387 | 12 | 0.666666667 | + | + |
| 5 | 471 | 388 | 12 | 0.666666667 | + | ++ |
| 5 | 472 | 388 | 12 | 0.666666667 | + | ++ |
| 5 | 473 | 386 | 12 | 0.583333333 | + | + |
| 5 | 474 | 388 | 12 | 0.666666667 | + | ++ |
| 5 | 475 | 386 | 12 | 0.583333333 | − | + |
| 5 | 476 | 386 | 12 | 0.583333333 | − | − |
| 5 | 477 | 388 | 12 | 0.666666667 | ++ | ++ |
| 5 | 478 | 388 | 12 | 0.666666667 | + | + |
| 5 | 479 | 386 | 12 | 0.583333333 | + | + |
| 5 | 480 | 386 | 12 | 0.583333333 | + | ++ |
| 5 | 481 | 387 | 12 | 0.666666667 | + | − |
| 5 | 482 | 387 | 12 | 0.666666667 | + | ++ |
| 5 | 483 | 387 | 12 | 0.666666667 | + | + |
| 11 | 897 | 388 | 12 | 0.666666667 | + | ++ |
| 11 | 898 | 388 | 12 | 0.666666667 | + | ++ |
| 11 | 899 | 388 | 12 | 0.666666667 | − | − |
| 11 | 900 | 388 | 12 | 0.666666667 | − | − |
| 11 | 902 | 386 | 12 | 0.583333333 | − | ++ |
| 11 | 903 | 386 | 12 | 0.583333333 | − | ++ |
| 11 | 904 | 386 | 12 | 0.583333333 | + | − |
| 11 | 905 | 386 | 12 | 0.583333333 | + | ++ |
| 11 | 906 | 386 | 12 | 0.583333333 | − | + |
| 11 | 907 | 387 | 12 | 0.666666667 | − | + |
| 11 | 908 | 387 | 12 | 0.666666667 | + | − |
| 11 | 909 | 387 | 12 | 0.666666667 | + | + |
| 11 | 910 | 387 | 12 | 0.666666667 | + | + |
| 11 | 911 | 387 | 12 | 0.666666667 | − | ++ |
| 18 | 1326 | 388 | 12 | 0.666666667 | + | ++ |
| 18 | 1327 | 388 | 12 | 0.666666667 | ++ | ++ |
| 18 | 1328 | 388 | 12 | 0.666666667 | + | + |
| 18 | 1329 | 388 | 12 | 0.666666667 | + | − |
| 18 | 1331 | 386 | 12 | 0.583333333 | + | − |
| 18 | 1332 | 386 | 12 | 0.583333333 | + | ++ |
| 18 | 1333 | 386 | 12 | 0.583333333 | + | − |
| 18 | 1334 | 386 | 12 | 0.583333333 | + | − |
| 18 | 1335 | 386 | 12 | 0.583333333 | + | ++ |
| 18 | 1336 | 387 | 12 | 0.666666667 | + | − |
| 18 | 1337 | 387 | 12 | 0.666666667 | + | + |
| 18 | 1338 | 387 | 12 | 0.666666667 | ++ | + |
| 18 | 1339 | 387 | 12 | 0.666666667 | + | + |
| 18 | 1340 | 387 | 12 | 0.666666667 | + | − |

TABLE 64
dual prime editing pegRNAs tested with single
prime editing system

| | pegRNA | RTT | | | | |
|---|---|---|---|---|---|---|
| 3′ | SEQ ID | paring | RTT | RTT | % editing | % indel |
| spacer | NO: | No. | length | GC % | efficiency | frequency |
| 5 | 1563 | 366 | 25 | 0.4 | + | + |
| 5 | 1565 | 221 | 28 | 0.29 | + | − |
| 5 | 1566 | 235 | 20 | 0.5 | + | − |
| 5 | 1567 | 374 | 28 | 0.61 | − | − |
| 5 | 1570 | 263 | 18 | 0.78 | − | − |
| 5 | 1572 | 180 | 25 | 0.48 | + | + |
| 5 | 1575 | 287 | 15 | 0.67 | + | − |
| 5 | 1576 | 170 | 15 | 0.53 | + | − |
| 5 | 1577 | 323 | 30 | 0.5 | + | + |
| 5 | 1578 | 381 | 40 | 0.4 | − | + |
| 5 | 1580 | 149 | 10 | 0.9 | − | − |
| 5 | 1581 | 104 | 30 | 0.4 | + | ++ |
| 5 | 1584 | 103 | 10 | 0.5 | ++ | − |
| 5 | 1586 | 134 | 28 | 0.64 | − | − |
| 5 | 1587 | 138 | 18 | 0.39 | + | − |
| 5 | 1588 | 356 | 28 | 0.5 | + | ++ |
| 5 | 1589 | 305 | 22 | 0.59 | +++ | + |
| 5 | 1590 | 266 | 20 | 0.8 | − | − |
| 5 | 1591 | 142 | 22 | 0.82 | − | + |
| 5 | 1592 | 218 | 15 | 0.93 | − | − |
| 5 | 1598 | 303 | 18 | 0.83 | + | − |
| 5 | 1599 | 211 | 15 | 0.87 | − | ++ |
| 5 | 1605 | 239 | 15 | 0.27 | + | + |
| 5 | 1607 | 373 | 20 | 0.75 | + | + |
| 5 | 1608 | 157 | 10 | 0.8 | ++ | − |
| 5 | 1609 | 113 | 18 | 0.39 | ++ | +++ |
| 5 | 1618 | 133 | 15 | 0.67 | + | + |
| 5 | 1620 | 172 | 20 | 0.65 | − | + |
| 5 | 1622 | 205 | 10 | 0.8 | + | ++ |
| 5 | 1623 | 124 | 28 | 0.61 | − | − |
| 5 | 1627 | 213 | 15 | 0.93 | − | − |
| 5 | 1634 | 383 | 28 | 0.5 | + | − |
| 5 | 1635 | 293 | 18 | 0.89 | − | − |
| 5 | 1637 | 188 | 22 | 0.68 | − | − |
| 5 | 1639 | 179 | 15 | 0.73 | + | − |
| 5 | 1640 | 181 | 10 | 0.8 | + | − |
| 5 | 1644 | 375 | 18 | 0.67 | − | ++ |
| 5 | 1645 | 260 | 25 | 0.48 | ++ | ++ |
| 5 | 1651 | 128 | 20 | 0.6 | + | + |
| 5 | 1652 | 175 | 25 | 0.64 | − | − |
| 5 | 1653 | 243 | 18 | 0.67 | + | − |
| 5 | 1655 | 307 | 20 | 0.65 | ++ | ++ |
| 5 | 1656 | 102 | 15 | 0.53 | + | ++ |
| 5 | 1657 | 329 | 15 | 0.67 | − | ++ |
| 5 | 1658 | 286 | 30 | 0.5 | + | − |
| 5 | 1659 | 145 | 10 | 0.6 | + | ++ |
| 5 | 1660 | 244 | 30 | 0.73 | − | ++ |
| 5 | 1661 | 290 | 20 | 0.7 | +++ | − |
| 5 | 1662 | 321 | 10 | 0.8 | + | ++ |
| 5 | 1663 | 186 | 20 | 0.3 | + | ++ |
| 5 | 1666 | 283 | 18 | 0.67 | − | ++ |
| 5 | 1667 | 384 | 10 | 0.5 | − | ++ |
| 5 | 1670 | 288 | 20 | 0.6 | + | − |
| 5 | 1671 | 361 | 15 | 0.6 | + | − |
| 5 | 1674 | 278 | 20 | 0.5 | + | − |
| 5 | 1675 | 246 | 15 | 0.6 | − | ++ |
| 5 | 1676 | 291 | 28 | 0.64 | − | ++ |
| 5 | 1678 | 364 | 15 | 0.67 | + | − |
| 5 | 1679 | 229 | 10 | 0.6 | + | ++ |
| 5 | 1680 | 184 | 15 | 0.73 | + | − |
| 5 | 1681 | 169 | 10 | 0.9 | − | ++ |
| 5 | 1683 | 161 | 20 | 0.85 | − | + |
| 5 | 1686 | 379 | 10 | 0.6 | + | ++ |
| 5 | 1688 | 137 | 15 | 0.67 | + | + |
| 5 | 1690 | 231 | 22 | 0.64 | + | − |
| 5 | 1692 | 190 | 15 | 0.87 | − | ++ |
| 5 | 1694 | 353 | 20 | 0.4 | + | ++ |
| 5 | 1696 | 141 | 10 | 0.7 | + | ++ |
| 5 | 1698 | 348 | 20 | 0.8 | − | − |
| 5 | 1706 | 249 | 18 | 0.61 | + | − |
| 5 | 1709 | 140 | 18 | 0.89 | − | + |
| 5 | 1711 | 376 | 22 | 0.5 | + | − |
| 5 | 1712 | 269 | 15 | 0.87 | + | − |
| 5 | 1714 | 257 | 18 | 0.39 | + | − |
| 5 | 1715 | 131 | 22 | 0.59 | + | − |
| 5 | 1719 | 280 | 15 | 0.6 | − | + |
| 5 | 1720 | 125 | 22 | 0.64 | + | + |
| 5 | 1721 | 334 | 18 | 0.78 | − | − |
| 5 | 1722 | 232 | 28 | 0.61 | + | ++ |
| 5 | 1724 | 92 | 30 | 0.5 | + | − |
| 5 | 1726 | 355 | 35 | 0.4 | + | − |
| 5 | 1728 | 325 | 15 | 0.4 | + | ++++ |
| 5 | 1730 | 139 | 25 | 0.72 | − | ++ |
| 5 | 1732 | 114 | 18 | 0.78 | − | ++ |
| 5 | 1733 | 234 | 20 | 0.5 | ++ | − |
| 5 | 1738 | 135 | 20 | 0.85 | − | − |
| 5 | 1739 | 108 | 10 | 0.7 | + | − |
| 5 | 1744 | 330 | 30 | 0.4 | + | − |
| 5 | 1745 | 119 | 30 | 0.4 | + | − |
| 5 | 1746 | 252 | 35 | 0.51 | − | − |
| 5 | 1749 | 241 | 10 | 0.6 | + | − |
| 5 | 1750 | 338 | 20 | 0.4 | + | − |
| 5 | 1751 | 115 | 15 | 0.67 | − | + |
| 5 | 1757 | 107 | 15 | 0.4 | + | ++ |
| 5 | 1758 | 154 | 22 | 0.73 | + | − |
| 5 | 1759 | 127 | 22 | 0.5 | + | − |
| 5 | 1760 | 253 | 30 | 0.3 | ++ | − |
| 5 | 1761 | 80 | 18 | 0.28 | + | + |
| 5 | 1762 | 197 | 18 | 0.83 | − | ++ |
| 5 | 1763 | 371 | 40 | 0.3 | + | ++ |
| 5 | 1764 | 111 | 35 | 0.4 | − | + |
| 5 | 1765 | 228 | 28 | 0.39 | + | ++ |
| 5 | 1766 | 192 | 28 | 0.5 | + | − |
| 5 | 1767 | 367 | 22 | 0.32 | + | − |
| 5 | 1768 | 251 | 35 | 0.29 | + | + |
| 5 | 1769 | 292 | 30 | 0.7 | − | − |
| 5 | 1774 | 159 | 20 | 0.65 | + | − |
| 5 | 1775 | 282 | 18 | 0.72 | + | ++ |
| 5 | 1776 | 116 | 18 | 0.72 | − | − |
| 5 | 1778 | 279 | 15 | 0.53 | − | − |
| 5 | 1780 | 91 | 18 | 0.61 | + | − |
| 5 | 1781 | 83 | 25 | 0.4 | ++ | − |
| 5 | 1783 | 240 | 25 | 0.32 | + | − |
| 5 | 1785 | 345 | 15 | 0.8 | − | − |
| 5 | 1786 | 220 | 25 | 0.6 | − | + |
| 5 | 1787 | 106 | 15 | 0.8 | − | + |
| 5 | 1788 | 182 | 20 | 0.7 | − | − |
| 5 | 1789 | 183 | 15 | 0.73 | + | + |
| 5 | 1790 | 318 | 10 | 0.8 | + | + |
| 5 | 1791 | 331 | 25 | 0.48 | ++ | ++ |
| 5 | 1794 | 242 | 18 | 0.5 | + | − |
| 5 | 1795 | 150 | 20 | 0.7 | + | − |
| 5 | 1796 | 158 | 25 | 0.6 | − | − |
| 5 | 1797 | 174 | 10 | 0.8 | + | − |
| 5 | 1799 | 99 | 35 | 0.51 | − | − |
| 5 | 1801 | 185 | 25 | 0.4 | + | − |
| 5 | 1802 | 227 | 28 | 0.39 | ++ | − |
| 5 | 1804 | 341 | 18 | 0.5 | + | − |
| 5 | 1805 | 339 | 35 | 0.4 | + | ++ |
| 5 | 1807 | 324 | 18 | 0.5 | ++ | − |
| 5 | 1808 | 342 | 22 | 0.41 | + | − |
| 5 | 1809 | 87 | 20 | 0.4 | ++ | − |
| 5 | 1811 | 359 | 22 | 0.68 | − | − |
| 5 | 1812 | 350 | 22 | 0.41 | + | ++ |
| 5 | 1813 | 132 | 15 | 0.4 | + | + |
| 5 | 1814 | 146 | 30 | 0.6 | − | − |
| 5 | 1815 | 315 | 22 | 0.5 | + | − |
| 5 | 1816 | 370 | 22 | 0.41 | + | − |
| 10 | 1962 | 366 | 25 | 0.4 | +++ | ++ |
| 10 | 1964 | 221 | 28 | 0.29 | + | + |
| 10 | 1965 | 235 | 20 | 0.5 | + | − |
| 10 | 1969 | 263 | 18 | 0.78 | + | − |
| 10 | 1970 | 369 | 25 | 0.64 | − | +++ |
| 10 | 1971 | 180 | 25 | 0.48 | + | ++ |
| 10 | 1974 | 287 | 15 | 0.67 | +++ | + |
| 10 | 1975 | 170 | 15 | 0.53 | + | − |
| 10 | 1976 | 323 | 30 | 0.5 | ++ | − |
| 10 | 1977 | 381 | 40 | 0.4 | + | − |
| 10 | 1979 | 149 | 10 | 0.9 | + | ++ |
| 10 | 1980 | 104 | 30 | 0.4 | ++ | + |
| 10 | 1983 | 103 | 10 | 0.5 | ++ | + |
| 10 | 1984 | 215 | 18 | 0.72 | + | ++ |
| 10 | 1985 | 134 | 28 | 0.64 | − | − |
| 10 | 1986 | 138 | 18 | 0.39 | + | ++ |
| 10 | 1987 | 356 | 28 | 0.5 | + | − |
| 10 | 1988 | 305 | 22 | 0.59 | +++ | − |
| 10 | 1989 | 266 | 20 | 0.8 | − | ++ |
| 10 | 1990 | 142 | 22 | 0.82 | − | ++ |
| 10 | 1991 | 218 | 15 | 0.93 | − | − |
| 10 | 1997 | 303 | 18 | 0.83 | + | + |
| 10 | 1998 | 211 | 15 | 0.87 | + | + |
| 10 | 2002 | 209 | 18 | 0.78 | − | − |
| 10 | 2004 | 239 | 15 | 0.27 | ++ | + |
| 10 | 2006 | 373 | 20 | 0.75 | + | + |
| 10 | 2007 | 157 | 10 | 0.8 | ++ | ++ |
| 10 | 2008 | 113 | 18 | 0.39 | +++ | ++ |
| 10 | 2011 | 151 | 15 | 0.93 | + | + |
| 10 | 2015 | 322 | 40 | 0.6 | − | − |
| 10 | 2017 | 133 | 15 | 0.67 | + | + |
| 10 | 2019 | 172 | 20 | 0.65 | + | + |
| 10 | 2021 | 205 | 10 | 0.8 | + | ++ |
| 10 | 2022 | 124 | 28 | 0.61 | − | + |
| 10 | 2025 | 219 | 18 | 0.61 | ++ | − |
| 10 | 2026 | 213 | 15 | 0.93 | − | + |
| 10 | 2033 | 383 | 28 | 0.5 | + | + |
| 10 | 2034 | 293 | 18 | 0.89 | − | + |
| 10 | 2036 | 188 | 22 | 0.68 | + | − |
| 10 | 2038 | 179 | 15 | 0.73 | + | ++ |
| 10 | 2039 | 181 | 10 | 0.8 | ++ | +++ |
| 10 | 2043 | 375 | 18 | 0.67 | − | + |
| 10 | 2044 | 260 | 25 | 0.48 | ++ | ++ |
| 10 | 2048 | 155 | 20 | 0.75 | − | ++ |
| 10 | 2050 | 128 | 20 | 0.6 | + | ++ |
| 10 | 2051 | 175 | 25 | 0.64 | + | + |
| 10 | 2052 | 243 | 18 | 0.67 | ++ | + |
| 10 | 2054 | 307 | 20 | 0.65 | + | − |
| 10 | 2055 | 102 | 15 | 0.53 | ++ | + |
| 10 | 2056 | 329 | 15 | 0.67 | + | − |
| 10 | 2057 | 286 | 30 | 0.5 | +++ | + |
| 10 | 2058 | 145 | 10 | 0.6 | ++ | ++ |
| 10 | 2060 | 290 | 20 | 0.7 | ++ | + |
| 10 | 2061 | 321 | 10 | 0.8 | + | − |
| 10 | 2062 | 186 | 20 | 0.3 | + | ++ |
| 10 | 2065 | 283 | 18 | 0.67 | + | ++ |
| 10 | 2066 | 384 | 10 | 0.5 | + | + |
| 10 | 2067 | 223 | 15 | 0.8 | + | + |
| 10 | 2069 | 288 | 20 | 0.6 | ++++ | + |
| 10 | 2070 | 361 | 15 | 0.6 | +++ | + |
| 10 | 2072 | 216 | 25 | 0.6 | + | − |
| 10 | 2073 | 278 | 20 | 0.5 | ++ | ++ |
| 10 | 2074 | 246 | 15 | 0.6 | + | + |
| 10 | 2075 | 291 | 28 | 0.64 | + | − |
| 10 | 2077 | 364 | 15 | 0.67 | + | + |
| 10 | 2078 | 229 | 10 | 0.6 | + | ++ |
| 10 | 2079 | 184 | 15 | 0.73 | + | − |
| 10 | 2080 | 169 | 10 | 0.9 | + | + |
| 10 | 2082 | 161 | 20 | 0.85 | − | ++ |
| 10 | 2085 | 379 | 10 | 0.6 | + | − |
| 10 | 2087 | 137 | 15 | 0.67 | + | − |
| 10 | 2089 | 231 | 22 | 0.64 | + | + |
| 10 | 2091 | 190 | 15 | 0.87 | + | − |
| 10 | 2093 | 353 | 20 | 0.4 | + | + |
| 10 | 2094 | 166 | 18 | 0.78 | + | ++ |
| 10 | 2095 | 141 | 10 | 0.7 | + | + |
| 10 | 2097 | 348 | 20 | 0.8 | − | − |
| 10 | 2105 | 249 | 18 | 0.61 | ++ | + |
| 10 | 2108 | 140 | 18 | 0.89 | − | ++ |
| 10 | 2110 | 376 | 22 | 0.5 | ++ | + |
| 10 | 2111 | 269 | 15 | 0.87 | + | ++ |
| 10 | 2113 | 257 | 18 | 0.39 | ++ | − |
| 10 | 2114 | 131 | 22 | 0.59 | ++ | − |
| 10 | 2115 | 312 | 18 | 0.83 | − | ++ |
| 10 | 2116 | 198 | 20 | 0.9 | − | + |
| 10 | 2118 | 280 | 15 | 0.6 | + | + |
| 10 | 2119 | 125 | 22 | 0.64 | ++ | − |
| 10 | 2120 | 334 | 18 | 0.78 | − | + |
| 10 | 2121 | 232 | 28 | 0.61 | + | ++ |
| 10 | 2123 | 92 | 30 | 0.5 | + | − |
| 10 | 2125 | 355 | 35 | 0.4 | + | − |
| 10 | 2127 | 325 | 15 | 0.4 | +++ | ++ |
| 10 | 2129 | 139 | 25 | 0.72 | + | − |
| 10 | 2131 | 114 | 18 | 0.78 | + | ++ |
| 10 | 2132 | 234 | 20 | 0.5 | + | + |
| 10 | 2137 | 135 | 20 | 0.85 | − | ++ |
| 10 | 2138 | 108 | 10 | 0.7 | + | + |
| 10 | 2142 | 349 | 23 | 0.65 | + | + |
| 10 | 2143 | 330 | 30 | 0.4 | +++ | ++ |
| 10 | 2144 | 119 | 30 | 0.4 | + | − |
| 10 | 2145 | 252 | 35 | 0.51 | − | − |
| 10 | 2148 | 241 | 10 | 0.6 | + | + |
| 10 | 2149 | 338 | 20 | 0.4 | + | + |
| 10 | 2150 | 115 | 15 | 0.67 | + | + |
| 10 | 2156 | 107 | 15 | 0.4 | + | + |
| 10 | 2157 | 154 | 22 | 0.73 | + | + |
| 10 | 2158 | 127 | 22 | 0.5 | + | + |
| 10 | 2159 | 253 | 30 | 0.3 | ++++ | − |
| 10 | 2160 | 80 | 18 | 0.28 | + | ++ |
| 10 | 2161 | 197 | 18 | 0.83 | − | ++ |
| 10 | 2162 | 371 | 40 | 0.3 | ++ | − |
| 10 | 2163 | 111 | 35 | 0.4 | + | + |
| 10 | 2164 | 228 | 28 | 0.39 | +++ | ++ |
| 10 | 2165 | 192 | 28 | 0.5 | + | − |
| 10 | 2166 | 367 | 22 | 0.32 | + | − |
| 10 | 2167 | 251 | 35 | 0.29 | + | ++ |
| 10 | 2168 | 292 | 30 | 0.7 | − | +++ |
| 10 | 2171 | 225 | 22 | 0.64 | + | − |
| 10 | 2173 | 159 | 20 | 0.65 | + | − |
| 10 | 2174 | 282 | 18 | 0.72 | ++ | − |
| 10 | 2175 | 116 | 18 | 0.72 | + | ++ |
| 10 | 2177 | 279 | 15 | 0.53 | ++ | + |
| 10 | 2179 | 91 | 18 | 0.61 | + | + |
| 10 | 2180 | 83 | 25 | 0.4 | + | + |
| 10 | 2182 | 240 | 25 | 0.32 | ++ | + |
| 10 | 2183 | 270 | 20 | 0.6 | ++ | ++ |
| 10 | 2184 | 345 | 15 | 0.8 | − | + |
| 10 | 2185 | 220 | 25 | 0.6 | − | − |
| 10 | 2186 | 106 | 15 | 0.8 | + | − |
| 10 | 2187 | 182 | 20 | 0.7 | + | − |
| 10 | 2188 | 183 | 15 | 0.73 | + | − |
| 10 | 2189 | 318 | 10 | 0.8 | + | ++ |
| 10 | 2190 | 331 | 25 | 0.48 | ++ | ++ |
| 10 | 2193 | 242 | 18 | 0.5 | + | + |
| 10 | 2194 | 150 | 20 | 0.7 | + | ++ |
| 10 | 2195 | 158 | 25 | 0.6 | + | − |
| 10 | 2196 | 174 | 10 | 0.8 | + | − |
| 10 | 2198 | 99 | 35 | 0.51 | + | − |
| 10 | 2200 | 185 | 25 | 0.4 | + | − |
| 10 | 2201 | 227 | 28 | 0.39 | +++ | ++ |
| 10 | 2203 | 341 | 18 | 0.5 | +++ | ++ |
| 10 | 2204 | 339 | 35 | 0.4 | + | − |
| 10 | 2206 | 324 | 18 | 0.5 | ++++ | − |
| 10 | 2207 | 342 | 22 | 0.41 | ++++ | − |
| 10 | 2208 | 87 | 20 | 0.4 | ++ | − |
| 10 | 2210 | 359 | 22 | 0.68 | + | − |
| 10 | 2211 | 350 | 22 | 0.41 | + | + |
| 10 | 2212 | 132 | 15 | 0.4 | + | − |
| 10 | 2213 | 146 | 30 | 0.6 | − | − |
| 10 | 2214 | 315 | 22 | 0.5 | + | ++ |
| 10 | 2215 | 370 | 22 | 0.41 | ++ | − |
| 16 | 2371 | 366 | 25 | 0.4 | + | + |
| 16 | 2373 | 221 | 28 | 0.29 | − | − |
| 16 | 2374 | 235 | 20 | 0.5 | + | ++ |
| 16 | 2378 | 263 | 18 | 0.78 | − | − |
| 16 | 2380 | 180 | 25 | 0.48 | + | − |
| 16 | 2383 | 287 | 15 | 0.67 | + | + |
| 16 | 2384 | 170 | 15 | 0.53 | + | − |
| 16 | 2385 | 323 | 30 | 0.5 | + | ++ |
| 16 | 2386 | 381 | 40 | 0.4 | − | + |
| 16 | 2388 | 149 | 10 | 0.9 | + | + |
| 16 | 2389 | 104 | 30 | 0.4 | + | − |
| 16 | 2392 | 103 | 10 | 0.5 | + | ++ |
| 16 | 2393 | 215 | 18 | 0.72 | + | ++ |
| 16 | 2394 | 134 | 28 | 0.64 | − | − |
| 16 | 2395 | 138 | 18 | 0.39 | + | − |
| 16 | 2396 | 356 | 28 | 0.5 | + | + |
| 16 | 2397 | 305 | 22 | 0.59 | + | + |
| 16 | 2398 | 266 | 20 | 0.8 | − | ++ |
| 16 | 2399 | 142 | 22 | 0.82 | − | − |
| 16 | 2400 | 218 | 15 | 0.93 | − | ++ |
| 16 | 2406 | 303 | 18 | 0.83 | + | + |
| 16 | 2407 | 211 | 15 | 0.87 | + | − |
| 16 | 2411 | 209 | 18 | 0.78 | − | + |
| 16 | 2413 | 239 | 15 | 0.27 | + | ++ |
| 16 | 2415 | 373 | 20 | 0.75 | − | + |
| 16 | 2416 | 157 | 10 | 0.8 | + | + |
| 16 | 2417 | 113 | 18 | 0.39 | + | + |
| 16 | 2420 | 151 | 15 | 0.93 | − | − |
| 16 | 2426 | 133 | 15 | 0.67 | + | ++ |
| 16 | 2428 | 172 | 20 | 0.65 | − | − |
| 16 | 2430 | 205 | 10 | 0.8 | + | ++ |
| 16 | 2431 | 124 | 28 | 0.61 | + | + |
| 16 | 2434 | 219 | 18 | 0.61 | + | + |
| 16 | 2435 | 213 | 15 | 0.93 | − | − |
| 16 | 2442 | 383 | 28 | 0.5 | + | ++ |
| 16 | 2443 | 293 | 18 | 0.89 | − | − |
| 16 | 2445 | 188 | 22 | 0.68 | + | − |
| 16 | 2447 | 179 | 15 | 0.73 | + | + |
| 16 | 2448 | 181 | 10 | 0.8 | + | + |
| 16 | 2452 | 375 | 18 | 0.67 | − | ++ |
| 16 | 2453 | 260 | 25 | 0.48 | + | ++ |
| 16 | 2457 | 155 | 20 | 0.75 | − | + |
| 16 | 2459 | 128 | 20 | 0.6 | + | + |
| 16 | 2461 | 243 | 18 | 0.67 | + | ++ |
| 16 | 2463 | 307 | 20 | 0.65 | + | + |
| 16 | 2464 | 102 | 15 | 0.53 | + | + |
| 16 | 2465 | 329 | 15 | 0.67 | + | + |
| 16 | 2466 | 286 | 30 | 0.5 | + | ++ |
| 16 | 2467 | 145 | 10 | 0.6 | + | − |
| 16 | 2469 | 290 | 20 | 0.7 | + | ++ |
| 16 | 2470 | 321 | 10 | 0.8 | − | ++ |
| 16 | 2471 | 186 | 20 | 0.3 | − | − |
| 16 | 2474 | 283 | 18 | 0.67 | + | ++ |
| 16 | 2475 | 384 | 10 | 0.5 | + | + |
| 16 | 2476 | 223 | 15 | 0.8 | − | − |
| 16 | 2478 | 288 | 20 | 0.6 | + | − |
| 16 | 2479 | 361 | 15 | 0.6 | + | ++ |
| 16 | 2481 | 216 | 25 | 0.6 | + | − |
| 16 | 2482 | 278 | 20 | 0.5 | + | − |
| 16 | 2483 | 246 | 15 | 0.6 | + | − |
| 16 | 2484 | 291 | 28 | 0.64 | − | ++ |
| 16 | 2486 | 364 | 15 | 0.67 | + | + |
| 16 | 2487 | 229 | 10 | 0.6 | + | − |
| 16 | 2488 | 184 | 15 | 0.73 | + | + |
| 16 | 2491 | 161 | 20 | 0.85 | − | ++ |
| 16 | 2494 | 379 | 10 | 0.6 | + | + |
| 16 | 2496 | 137 | 15 | 0.67 | + | ++ |
| 16 | 2498 | 231 | 22 | 0.64 | + | + |
| 16 | 2500 | 190 | 15 | 0.87 | − | + |
| 16 | 2502 | 353 | 20 | 0.4 | + | − |
| 16 | 2503 | 166 | 18 | 0.78 | − | ++ |
| 16 | 2504 | 141 | 10 | 0.7 | − | + |
| 16 | 2506 | 348 | 20 | 0.8 | − | − |
| 16 | 2514 | 249 | 18 | 0.61 | + | − |
| 16 | 2516 | 363 | 22 | 0.59 | − | +++ |
| 16 | 2519 | 376 | 22 | 0.5 | + | − |
| 16 | 2520 | 269 | 15 | 0.87 | + | + |
| 16 | 2522 | 257 | 18 | 0.39 | + | ++ |
| 16 | 2523 | 131 | 22 | 0.59 | + | − |
| 16 | 2524 | 312 | 18 | 0.83 | − | + |
| 16 | 2525 | 198 | 20 | 0.9 | − | − |
| 16 | 2527 | 280 | 15 | 0.6 | + | + |
| 16 | 2528 | 125 | 22 | 0.64 | + | + |
| 16 | 2529 | 334 | 18 | 0.78 | − | + |
| 16 | 2530 | 232 | 28 | 0.61 | + | ++ |
| 16 | 2532 | 92 | 30 | 0.5 | + | + |
| 16 | 2534 | 355 | 35 | 0.4 | + | ++ |
| 16 | 2536 | 325 | 15 | 0.4 | − | ++ |
| 16 | 2538 | 139 | 25 | 0.72 | − | − |
| 16 | 2540 | 114 | 18 | 0.78 | − | ++++ |
| 16 | 2541 | 234 | 20 | 0.5 | + | + |
| 16 | 2546 | 135 | 20 | 0.85 | − | ++++ |
| 16 | 2547 | 108 | 10 | 0.7 | + | ++ |
| 16 | 2551 | 349 | 23 | 0.65 | − | − |
| 16 | 2552 | 330 | 30 | 0.4 | + | ++ |
| 16 | 2553 | 119 | 30 | 0.4 | + | − |
| 16 | 2554 | 252 | 35 | 0.51 | + | − |
| 16 | 2557 | 241 | 10 | 0.6 | − | − |
| 16 | 2558 | 338 | 20 | 0.4 | + | ++ |
| 16 | 2559 | 115 | 15 | 0.67 | + | + |
| 16 | 2565 | 107 | 15 | 0.4 | + | + |
| 16 | 2566 | 154 | 22 | 0.73 | + | − |
| 16 | 2567 | 127 | 22 | 0.5 | + | + |
| 16 | 2568 | 253 | 30 | 0.3 | + | + |
| 16 | 2569 | 80 | 18 | 0.28 | + | + |
| 16 | 2570 | 197 | 18 | 0.83 | − | ++ |
| 16 | 2571 | 371 | 40 | 0.3 | + | + |
| 16 | 2572 | 111 | 35 | 0.4 | + | ++ |
| 16 | 2573 | 228 | 28 | 0.39 | + | ++ |
| 16 | 2574 | 192 | 28 | 0.5 | + | ++ |
| 16 | 2575 | 367 | 22 | 0.32 | + | + |
| 16 | 2576 | 251 | 35 | 0.29 | + | + |
| 16 | 2577 | 292 | 30 | 0.7 | − | − |
| 16 | 2582 | 159 | 20 | 0.65 | + | − |
| 16 | 2583 | 282 | 18 | 0.72 | + | + |
| 16 | 2584 | 116 | 18 | 0.72 | + | + |
| 16 | 2586 | 279 | 15 | 0.53 | + | + |
| 16 | 2587 | 337 | 28 | 0.39 | − | +++ |
| 16 | 2588 | 91 | 18 | 0.61 | + | + |
| 16 | 2589 | 83 | 25 | 0.4 | + | + |
| 16 | 2590 | 143 | 22 | 0.86 | − | ++ |
| 16 | 2591 | 240 | 25 | 0.32 | + | + |
| 16 | 2592 | 270 | 20 | 0.6 | + | − |
| 16 | 2593 | 345 | 15 | 0.8 | − | + |
| 16 | 2594 | 220 | 25 | 0.6 | − | − |
| 16 | 2595 | 106 | 15 | 0.8 | − | ++ |
| 16 | 2596 | 182 | 20 | 0.7 | + | − |
| 16 | 2597 | 183 | 15 | 0.73 | + | − |
| 16 | 2598 | 318 | 10 | 0.8 | + | + |
| 16 | 2599 | 331 | 25 | 0.48 | + | + |
| 16 | 2602 | 242 | 18 | 0.5 | + | − |
| 16 | 2603 | 150 | 20 | 0.7 | + | + |
| 16 | 2604 | 158 | 25 | 0.6 | + | − |
| 16 | 2605 | 174 | 10 | 0.8 | + | − |
| 16 | 2606 | 327 | 20 | 0.8 | − | − |
| 16 | 2609 | 185 | 25 | 0.4 | + | + |
| 16 | 2610 | 227 | 28 | 0.39 | + | + |
| 16 | 2612 | 341 | 18 | 0.5 | + | ++ |
| 16 | 2613 | 339 | 35 | 0.4 | + | ++ |
| 16 | 2615 | 324 | 18 | 0.5 | + | + |
| 16 | 2616 | 342 | 22 | 0.41 | + | − |
| 16 | 2617 | 87 | 20 | 0.4 | + | + |
| 16 | 2619 | 359 | 22 | 0.68 | − | ++ |
| 16 | 2620 | 350 | 22 | 0.41 | + | − |
| 16 | 2621 | 132 | 15 | 0.4 | + | ++ |
| 16 | 2622 | 146 | 30 | 0.6 | − | − |
| 16 | 2623 | 315 | 22 | 0.5 | + | + |
| 16 | 2624 | 370 | 22 | 0.41 | + | + |

TABLE 65
dual prime editing pegRNAs tested with single prime editing system

| | pegRNA | RTT | | | % | % |
|---|---|---|---|---|---|---|
| 3′ | SEQ ID | pairing | RTT | RTT | editing | indel |
| spacer | NO: | No. | length | GC % | efficiency | frequency |
| 5 | 1818 | 84 | 25 | 0.6 | − | ++ |
| 5 | 1819 | 85 | 15 | 0.8 | − | ++ |
| 5 | 1819 | 85 | 15 | 0.8 | − | ++ |
| 5 | 1819 | 85 | 15 | 0.8 | − | +++ |
| 5 | 1820 | 86 | 25 | 0.48 | − | − |
| 5 | 1820 | 86 | 25 | 0.48 | − | + |
| 5 | 1820 | 86 | 25 | 0.48 | − | − |
| 5 | 1821 | 88 | 30 | 0.4 | + | + |
| 5 | 1822 | 89 | 25 | 0.4 | + | − |
| 5 | 1822 | 89 | 25 | 0.4 | + | − |
| 5 | 1823 | 90 | 20 | 0.8 | − | − |
| 5 | 1823 | 90 | 20 | 0.8 | − | − |
| 5 | 1823 | 90 | 20 | 0.8 | − | ++ |
| 5 | 1826 | 96 | 15 | 0.6 | ++ | − |
| 5 | 1826 | 96 | 15 | 0.6 | +++ | − |
| 5 | 1826 | 96 | 15 | 0.6 | ++ | + |
| 5 | 1827 | 112 | 15 | 0.67 | + | + |
| 5 | 1827 | 112 | 15 | 0.67 | + | + |
| 5 | 1827 | 112 | 15 | 0.67 | + | + |
| 5 | 1828 | 121 | 20 | 0.5 | + | − |
| 5 | 1829 | 122 | 15 | 0.4 | ++ | + |
| 5 | 1829 | 122 | 15 | 0.4 | + | − |
| 5 | 1829 | 122 | 15 | 0.4 | ++ | + |
| 5 | 1830 | 123 | 20 | 0.6 | − | − |
| 5 | 1830 | 123 | 20 | 0.6 | − | − |
| 5 | 1831 | 129 | 15 | 0.53 | +++ | − |
| 5 | 1831 | 129 | 15 | 0.53 | ++ | + |
| 5 | 1831 | 129 | 15 | 0.53 | ++++ | − |
| 5 | 1832 | 130 | 30 | 0.5 | + | + |
| 5 | 1832 | 130 | 30 | 0.5 | + | + |
| 5 | 1832 | 130 | 30 | 0.5 | ++ | − |
| 5 | 1836 | 206 | 30 | 0.4 | + | − |
| 5 | 1840 | 306 | 20 | 0.7 | + | − |
| 5 | 1840 | 306 | 20 | 0.7 | − | ++ |
| 5 | 1843 | 319 | 20 | 0.6 | + | + |
| 5 | 1845 | 340 | 25 | 0.4 | + | ++ |
| 5 | 1846 | 368 | 20 | 0.5 | ++ | ++ |
| 5 | 1847 | 380 | 20 | 0.5 | + | − |
| 5 | 1848 | 382 | 20 | 0.4 | ++ | − |
| 5 | 1848 | 382 | 20 | 0.4 | ++ | − |
| 5 | 1848 | 382 | 20 | 0.4 | +++ | − |
| 10 | 2217 | 85 | 15 | 0.8 | + | ++ |
| 10 | 2217 | 85 | 15 | 0.8 | − | ++ |
| 10 | 2218 | 88 | 30 | 0.4 | +++ | + |
| 10 | 2218 | 88 | 30 | 0.4 | +++ | ++ |
| 10 | 2219 | 90 | 20 | 0.8 | − | + |
| 10 | 2223 | 96 | 15 | 0.6 | +++ | ++ |
| 10 | 2223 | 96 | 15 | 0.6 | +++ | ++ |
| 10 | 2223 | 96 | 15 | 0.6 | +++ | − |
| 10 | 2224 | 110 | 20 | 0.7 | − | + |
| 10 | 2224 | 110 | 20 | 0.7 | − | − |
| 10 | 2225 | 112 | 15 | 0.67 | + | ++ |
| 10 | 2225 | 112 | 15 | 0.67 | ++ | + |
| 10 | 2225 | 112 | 15 | 0.67 | ++ | + |
| 10 | 2226 | 122 | 15 | 0.4 | ++ | + |
| 10 | 2227 | 123 | 20 | 0.6 | − | − |
| 10 | 2227 | 123 | 20 | 0.6 | − | − |
| 10 | 2228 | 129 | 15 | 0.53 | +++ | ++ |
| 10 | 2228 | 129 | 15 | 0.53 | +++ | ++ |
| 10 | 2228 | 129 | 15 | 0.53 | +++ | ++ |
| 10 | 2229 | 130 | 30 | 0.5 | ++ | ++ |
| 10 | 2229 | 130 | 30 | 0.5 | + | − |
| 10 | 2229 | 130 | 30 | 0.5 | +++ | − |
| 10 | 2230 | 144 | 30 | 0.4 | ++ | ++ |
| 10 | 2234 | 247 | 25 | 0.4 | + | ++ |
| 10 | 2234 | 247 | 25 | 0.4 | ++ | ++ |
| 10 | 2234 | 247 | 25 | 0.4 | + | − |
| 10 | 2236 | 272 | 25 | 0.6 | + | ++ |
| 10 | 2238 | 306 | 20 | 0.7 | ++ | + |
| 10 | 2241 | 319 | 20 | 0.6 | ++ | + |
| 10 | 2242 | 351 | 25 | 0.48 | ++ | ++ |
| 10 | 2242 | 351 | 25 | 0.48 | ++ | + |
| 10 | 2242 | 351 | 25 | 0.48 | +++ | − |
| 10 | 2243 | 354 | 15 | 0.4 | ++ | − |
| 10 | 2243 | 354 | 15 | 0.4 | ++ | ++ |
| 10 | 2244 | 368 | 20 | 0.5 | +++ | + |
| 10 | 2244 | 368 | 20 | 0.5 | +++ | − |
| 10 | 2245 | 378 | 15 | 0.8 | ++ | ++ |
| 10 | 2246 | 380 | 20 | 0.5 | + | ++ |
| 10 | 2247 | 382 | 20 | 0.4 | ++ | ++ |
| 10 | 2247 | 382 | 20 | 0.4 | ++ | ++ |
| 10 | 2247 | 382 | 20 | 0.4 | ++ | + |
| 16 | 2626 | 81 | 15 | 0.4 | + | ++ |
| 16 | 2627 | 86 | 25 | 0.48 | − | ++ |
| 16 | 2627 | 86 | 25 | 0.48 | − | ++ |
| 16 | 2628 | 88 | 30 | 0.4 | + | + |
| 16 | 2629 | 89 | 25 | 0.4 | + | ++ |
| 16 | 2629 | 89 | 25 | 0.4 | + | − |
| 16 | 2629 | 89 | 25 | 0.4 | + | ++ |
| 16 | 2630 | 90 | 20 | 0.8 | − | − |
| 16 | 2630 | 90 | 20 | 0.8 | − | ++ |
| 16 | 2630 | 90 | 20 | 0.8 | − | ++ |
| 16 | 2633 | 96 | 15 | 0.6 | + | ++ |
| 16 | 2633 | 96 | 15 | 0.6 | + | − |
| 16 | 2635 | 105 | 15 | 0.8 | + | ++ |
| 16 | 2636 | 109 | 20 | 0.4 | + | + |
| 16 | 2636 | 109 | 20 | 0.4 | + | ++ |
| 16 | 2636 | 109 | 20 | 0.4 | + | ++ |
| 16 | 2637 | 123 | 20 | 0.6 | − | + |
| 16 | 2637 | 123 | 20 | 0.6 | − | + |
| 16 | 2638 | 126 | 15 | 0.4 | + | + |
| 16 | 2638 | 126 | 15 | 0.4 | + | + |
| 16 | 2639 | 129 | 15 | 0.53 | + | − |
| 16 | 2639 | 129 | 15 | 0.53 | + | + |
| 16 | 2639 | 129 | 15 | 0.53 | + | − |
| 16 | 2640 | 130 | 30 | 0.5 | + | ++ |
| 16 | 2640 | 130 | 30 | 0.5 | + | ++ |
| 16 | 2640 | 130 | 30 | 0.5 | + | − |
| 16 | 2644 | 206 | 30 | 0.4 | + | ++ |
| 16 | 2646 | 250 | 15 | 0.6 | − | ++ |
| 16 | 2647 | 259 | 30 | 0.4 | + | + |
| 16 | 2648 | 300 | 25 | 0.6 | − | ++ |
| 16 | 2648 | 300 | 25 | 0.6 | + | − |
| 16 | 2648 | 300 | 25 | 0.6 | + | ++ |
| 16 | 2649 | 306 | 20 | 0.7 | + | + |
| 16 | 2649 | 306 | 20 | 0.7 | + | ++ |
| 16 | 2649 | 306 | 20 | 0.7 | + | ++ |
| 16 | 2651 | 319 | 20 | 0.6 | + | − |
| 16 | 2652 | 320 | 15 | 0.67 | + | + |
| 16 | 2652 | 320 | 15 | 0.67 | + | − |
| 16 | 2652 | 320 | 15 | 0.67 | + | + |
| 16 | 2654 | 351 | 25 | 0.48 | + | ++ |
| 16 | 2655 | 368 | 20 | 0.5 | + | − |
| 16 | 2656 | 378 | 15 | 0.8 | − | + |
| 16 | 2657 | 380 | 20 | 0.5 | − | + |
| 16 | 2657 | 380 | 20 | 0.5 | − | − |

TABLE 66
dual prime editing pegRNAs tested with single prime editing system

| 3′ | pegRNA | RTT | | | % | % |
|---|---|---|---|---|---|---|
| | SEQ ID | pairing | RTT | RTT | editing | indel |
| spacer | NO: | No. | length | GC % | efficiency | frequency |
| 5 | 1849 | 390 | 12 | 0.5 | + | − |
| 5 | 1850 | 390 | 12 | 0.5 | − | − |
| 5 | 1851 | 390 | 12 | 0.5 | + | + |
| 5 | 1852 | 390 | 12 | 0.5 | + | − |
| 5 | 1853 | 390 | 12 | 0.5 | − | +++ |
| 5 | 1854 | 392 | 12 | 0.916666667 | − | ++ |
| 5 | 1855 | 392 | 12 | 0.916666667 | + | − |
| 5 | 1859 | 391 | 12 | 0.583333333 | + | − |
| 5 | 1860 | 391 | 12 | 0.583333333 | + | − |
| 5 | 1861 | 391 | 12 | 0.583333333 | ++ | ++ |
| 5 | 1862 | 391 | 12 | 0.583333333 | ++ | ++ |
| 5 | 1863 | 391 | 12 | 0.583333333 | + | + |
| 10 | 2248 | 390 | 12 | 0.5 | ++ | +++ |
| 10 | 2249 | 390 | 12 | 0.5 | ++ | + |
| 10 | 2250 | 390 | 12 | 0.5 | ++ | − |
| 10 | 2251 | 390 | 12 | 0.5 | + | − |
| 10 | 2252 | 390 | 12 | 0.5 | + | − |
| 10 | 2253 | 392 | 12 | 0.916666667 | − | ++ |
| 10 | 2254 | 392 | 12 | 0.916666667 | − | ++ |
| 10 | 2255 | 392 | 12 | 0.916666667 | − | ++ |
| 10 | 2258 | 391 | 12 | 0.583333333 | + | − |
| 10 | 2259 | 391 | 12 | 0.583333333 | + | ++ |
| 10 | 2260 | 391 | 12 | 0.583333333 | ++ | ++ |
| 10 | 2261 | 391 | 12 | 0.583333333 | ++++ | + |
| 10 | 2262 | 391 | 12 | 0.583333333 | + | − |
| 16 | 2658 | 390 | 12 | 0.5 | − | − |
| 16 | 2659 | 390 | 12 | 0.5 | + | ++ |
| 16 | 2660 | 390 | 12 | 0.5 | + | − |
| 16 | 2661 | 390 | 12 | 0.5 | + | + |
| 16 | 2662 | 390 | 12 | 0.5 | − | − |
| 16 | 2663 | 392 | 12 | 0.916666667 | + | ++ |
| 16 | 2664 | 392 | 12 | 0.916666667 | − | − |
| 16 | 2668 | 391 | 12 | 0.583333333 | + | − |
| 16 | 2669 | 391 | 12 | 0.583333333 | + | − |
| 16 | 2670 | 391 | 12 | 0.583333333 | + | + |
| 16 | 2671 | 391 | 12 | 0.583333333 | + | − |
| 16 | 2672 | 391 | 12 | 0.583333333 | + | + |

[1317] Table 67 provides sequences referenced throughout the present disclosure.

TABLE 67
amino acid and nucleic acid sequences

| SEQ | | |
|---|---|---|
| ID NO: | Description | SEQUENCE |
| 3577 | WT M-MLV RT | TLNIEDEHRLHETSKEPDVSLGSTWLSDFPQAWAETGGMGLAVRQAPLIIPLKATST |
| | | PVSIKQYPMSQEARLGIKPHIQRLLDQGILVPCQSPWNTPLLPVKKPGTNDYRPVQD |
| | | LREVNKRVEDIHPTVPNPYNLLSGLPPSHQWYTVLDLKDAFFCLRLHPTSQPLFAFE |
| | | WRDPEMGISGQLTWTRLPQGFKNSPTLFDEALHRDLADFRIQHPDLILLQYVDDLLL |
| | | AATSELDCQQGTRALLQTLGNLGYRASAKKAQICQKQVKYLGYLLKEGQRWLTEA |
| | | RKETVMGQPTPKTPRQLREFLGTAGFCRLWIPGFAEMAAPLYPLTKTGTLFNWGPD |
| | | QQKAYQEIKQALLTAPALGLPDLTKPFELFVDEKQGYAKGVLTQKLGPWRRPVAYL |
| | | SKKLDPVAAGWPPCLRMVAAIAVLTKDAGKLTMGQPLVILAPHAVEALVKQPPDR |
| | | WLSNARMTHYQALLLDTDRVQFGPVVALNPATLLPLPEEGLQHNCLDILAEAHGTR |
| | | PDLTDQPLPDADHTWYTDGSSLLQEGQRKAGAAVTTETEVIWAKALPAGTSAQRA |
| | | ELIALTQALKMAEGKKLNVYTDSRYAFATAHIHGEIYRRRGLLTSEGKEIKNKDEIL |
| | | ALLKALFLPKRLSIIHCPGHQKGHSAEARGNRMADQAARKAAITETPDTSTLLIENSS |
| | | P |
| 3578 | Reference M-MLV | TLNIEDEYRLHETSKEPDVSLGSTWLSDFPQAWAETGGMGLAVRQAPLIIPLKATST |
| | RT; M-MLV | PVSIKQYPMSQEARLGIKPHIQRLLDQGILVPCQSPWNTPLLPVKKPGTNDYRPVQD |
| | (H8Y) RT | LREVNKRVEDIHPTVPNPYNLLSGLPPSHQWYTVLDLKDAFFCLRLHPTSQPLFAFE |
| | | WRDPEMGISGQLTWTRLPQGFKNSPTLFDEALHRDLADFRIQHPDLILLQYVDDLLL |
| | | AATSELDCQQGTRALLQTLGNLGYRASAKKAQICQKQVKYLGYLLKEGQRWLTEA |
| | | RKETVMGQPTPKTPRQLREFLGTAGFCRLWIPGFAEMAAPLYPLTKTGTLFNWGPD |
| | | QQKAYQEIKQALLTAPALGLPDLTKPFELFVDEKQGYAKGVLTQKLGPWRRPVAYL |
| | | SKKLDPVAAGWPPCLRMVAAIAVLTKDAGKLTMGQPLVILAPHAVEALVKQPPDR |
| | | WLSNARMTHYQALLLDTDRVQFGPVVALNPATLLPLPEEGLQHNCLDILAEAHGTR |
| | | PDLTDQPLPDADHTWYTDGSSLLQEGQRKAGAAVTTETEVIWAKALPAGTSAQRA |
| | | ELIALTQALKMAEGKKLNVYTDSRYAFATAHIHGEIYRRRGLLTSEGKEIKNKDEIL |
| | | ALLKALFLPKRLSIIHCPGHQKGHSAEARGNRMADQAARKAAITETPDTSTLLIENSS |
| | | P |
| 3579 | M-MLV RT | TLNIEDEYRLHETSKEPDVSLGSTWLSDFPQAWAETGGMGLAVRQAPLIIPLKATST |
| | (pentamutant | PVSIKQYPMSQEARLGIKPHIQRLLDQGILVPCQSPWNTPLLPVKKPGTNDYRPVQD |
| | compared to | LREVNKRVEDIHPTVPNPYNLLSGLPPSHQWYTVLDLKDAFFCLRLHPTSQPLFAFE |
| | Reference M-MLV) | WRDPEMGISGQLTWTRLPQGFKNSPTLFNEALHRDLADFRIQHPDLILLQYVDDLLL |
| | | AATSELDCQQGTRALLQTLGNLGYRASAKKAQICQKQVKYLGYLLKEGQRWLTEA |
| | | RKETVMGQPTPKTPRQLREFLGKAGFCRLFIPGFAEMAAPLYPLTKPGTLFNWGPDQ |
| | | QKAYQEIKQALLTAPALGLPDLTKPFELFVDEKQGYAKGVLTQKLGPWRRPVAYLS |
| | | KKLDPVAAGWPPCLRMVAAIAVLTKDAGKLTMGQPLVILAPHAVEALVKQPPDRW |
| | | LSNARMTHYQALLLDTDRVQFGPVVALNPATLLPLPEEGLQHNCLDILAEAHGTRP |
| | | DLTDQPLPDADHTWYTDGSSLLQEGQRKAGAAVTTETEVIWAKALPAGTSAQRAE |
| | | LIALTQALKMAEGKKLNVYTDSRYAFATAHIHGEIYRRRGWLTSEGKEIKNKDEILA |
| | | LLKALFLPKRLSIIHCPGHQKGHSAEARGNRMADQAARKAAITETPDTSTLLIENSSP |
| 3580 | Wild Type | MDKKYSIGLDIGTNSVGWAVITDEYKVPSKKFKVLGNTDRHSIKKNLIGALLFDSGE |
| | Streptococcus | TAEATRLKRTARRRYTRRKNRICYLQEIFSNEMAKVDDSFFHRLEESFLVEEDKKHE |
| | pyogenes Cas9 | RHPIFGNIVDEVAYHEKYPTIYHLRKKLVDSTDKADLRLIYLALAHMIKFRGHFLIEG |
| | (SpCas9) | DLNPDNSDVDKLFIQLVQTYNQLFEENPINASGVDAKAILSARLSKSRRLENLIAQLP |
| | | GEKKNGLFGNLIALSLGLTPNFKSNFDLAEDAKLQLSKDTYDDDLDNLLAQIGDQY |
| | | ADLFLAAKNLSDAILLSDILRVNTEITKAPLSASMIKRYDEHHQDLTLLKALVRQQLP |
| | | EKYKEIFFDQSKNGYAGYIDGGASQEEFYKFIKPILEKMDGTEELLVKLNREDLLRK |
| | | QRTFDNGSIPHQIHLGELHAILRRQEDFYPFLKDNREKIEKILTFRIPYYVGPLARGNS |
| | | RFAWMTRKSEETITPWNFEEVVDKGASAQSFIERMTNFDKNLPNEKVLPKHSLLYE |
| | | YFTVYNELTKVKYVTEGMRKPAFLSGEQKKAIVDLLFKTNRKVTVKQLKEDYFKKI |
| | | ECFDSVEISGVEDRFNASLGTYHDLLKIIKDKDFLDNEENEDILEDIVLTLTLFEDREM |
| | | IEERLKTYAHLFDDKVMKQLKRRRYTGWGRLSRKLINGIRDKQSGKTILDFLKSDGF |
| | | ANRNFMQLIHDDSLTFKEDIQKAQVSGQGDSLHEHIANLAGSPAIKKGILQTVKVVD |
| | | ELVKVMGRHKPENIVIEMARENQTTQKGQKNSRERMKRIEEGIKELGSQILKEHPVE |
| | | NTQLQNEKLYLYYLQNGRDMYVDQELDINRLSDYDVDHIVPQSFLKDDSIDNKVLT |
| | | RSDKNRGKSDNVPSEEVVKKMKNYWRQLLNAKLITQRKFDNLTKAERGGLSELDK |
| | | AGFIKRQLVETRQITKHVAQILDSRMNTKYDENDKLIREVKVITLKSKLVSDFRKDF |
| | | QFYKVREINNYHHAHDAYLNAVVGTALIKKYPKLESEFVYGDYKVYDVRKMIAKS |
| | | EQEIGKATAKYFFYSNIMNFFKTEITLANGEIRKRPLIETNGETGEIVWDKGRDFATV |
| | | RKVLSMPQVNIVKKTEVQTGGFSKESILPKRNSDKLIARKKDWDPKKYGGFDSPTV |
| | | AYSVLVVAKVEKGKSKKLKSVKELLGITIMERSSFEKNPIDFLEAKGYKEVKKDLIIK |
| | | LPKYSLFELENGRKRMLASAGELQKGNELALPSKYVNFLYLASHYEKLKGSPEDNE |
| | | QKQLFVEQHKHYLDEIIEQISEFSKRVILADANLDKVLSAYNKHRDKPIREQAENIIH |
| | | LFTLTNLGAPAAFKYFDTTIDRKRYTSTKEVLDATLIHQSITGLYETRIDLSQLGGD |
| 3581 | spCas9(H840A) | MDKKYSIGLDIGTNSVGWAVITDEYKVPSKKFKVLGNTDRHSIKKNLIGALLFDSGE |
| | Nickase | TAEATRLKRTARRRYTRRKNRICYLQEIFSNEMAKVDDSFFHRLEESFLVEEDKKHE |
| | | RHPIFGNIVDEVAYHEKYPTIYHLRKKLVDSTDKADLRLIYLALAHMIKFRGHFLIEG |
| | | DLNPDNSDVDKLFIQLVQTYNQLFEENPINASGVDAKAILSARLSKSRRLENLIAQLP |
| | | GEKKNGLFGNLIALSLGLTPNFKSNFDLAEDAKLQLSKDTYDDDLDNLLAQIGDQY |
| | | ADLFLAAKNLSDAILLSDILRVNTEITKAPLSASMIKRYDEHHQDLTLLKALVRQQLP |
| | | EKYKEIFFDQSKNGYAGYIDGGASQEEFYKFIKPILEKMDGTEELLVKLNREDLLRK |
| | | QRTFDNGSIPHQIHLGELHAILRRQEDFYPFLKDNREKIEKILTFRIPYYVGPLARGNS |
| | | RFAWMTRKSEETITPWNFEEVVDKGASAQSFIERMTNFDKNLPNEKVLPKHSLLYE |
| | | YFTVYNELTKVKYVTEGMRKPAFLSGEQKKAIVDLLFKTNRKVTVKQLKEDYFKKI |
| | | ECFDSVEISGVEDRFNASLGTYHDLLKIIKDKDFLDNEENEDILEDIVLTLTLFEDREM |
| | | IEERLKTYAHLFDDKVMKQLKRRRYTGWGRLSRKLINGIRDKQSGKTILDFLKSDGF |
| | | ANRNFMQLIHDDSLTFKEDIQKAQVSGQGDSLHEHIANLAGSPAIKKGILQTVKVVD |
| | | ELVKVMGRHKPENIVIEMARENQTTQKGQKNSRERMKRIEEGIKELGSQILKEHPVE |
| | | NTQLQNEKLYLYYLQNGRDMYVDQELDINRLSDYDVDAIVPQSFLKDDSIDNKVLT |
| | | RSDKNRGKSDNVPSEEVVKKMKNYWRQLLNAKLITQRKFDNLTKAERGGLSELDK |
| | | AGFIKRQLVETRQITKHVAQILDSRMNTKYDENDKLIREVKVITLKSKLVSDFRKDF |
| | | QFYKVREINNYHHAHDAYLNAVVGTALIKKYPKLESEFVYGDYKVYDVRKMIAKS |
| | | EQEIGKATAKYFFYSNIMNFFKTEITLANGEIRKRPLIETNGETGEIVWDKGRDFATV |
| | | RKVLSMPQVNIVKKTEVQTGGFSKESILPKRNSDKLIARKKDWDPKKYGGFDSPTV |
| | | AYSVLVVAKVEKGKSKKLKSVKELLGITIMERSSFEKNPIDFLEAKGYKEVKKDLIIK |
| | | LPKYSLFELENGRKRMLASAGELQKGNELALPSKYVNFLYLASHYEKLKGSPEDNE |
| | | QKQLFVEQHKHYLDEIIEQISEFSKRVILADANLDKVLSAYNKHRDKPIREQAENIIH |
| | | LFTLTNLGAPAAFKYFDTTIDRKRYTSTKEVLDATLIHQSITGLYETRIDLSQLGGD |
| 3582 | Met(−) | DKKYSIGLDIGTNSVGWAVITDEYKVPSKKFKVLGNTDRHSIKKNLIGALLFDSGET |
| | spCas9(H839A) | AEATRLKRTARRRYTRRKNRICYLQEIFSNEMAKVDDSFFHRLEESFLVEEDKKHER |
| | Nickase | HPIFGNIVDEVAYHEKYPTIYHLRKKLVDSTDKADLRLIYLALAHMIKFRGHFLIEGD |
| | | LNPDNSDVDKLFIQLVQTYNQLFEENPINASGVDAKAILSARLSKSRRLENLIAQLPG |
| | | EKKNGLFGNLIALSLGLTPNFKSNFDLAEDAKLQLSKDTYDDDLDNLLAQIGDQYA |
| | | DLFLAAKNLSDAILLSDILRVNTEITKAPLSASMIKRYDEHHQDLTLLKALVRQQLPE |
| | | KYKEIFFDQSKNGYAGYIDGGASQEEFYKFIKPILEKMDGTEELLVKLNREDLLRKQ |
| | | RTFDNGSIPHQIHLGELHAILRRQEDFYPFLKDNREKIEKILTFRIPYYVGPLARGNSR |
| | | FAWMTRKSEETITPWNFEEVVDKGASAQSFIERMTNFDKNLPNEKVLPKHSLLYEY |
| | | FTVYNELTKVKYVTEGMRKPAFLSGEQKKAIVDLLFKTNRKVTVKQLKEDYFKKIE |
| | | CFDSVEISGVEDRFNASLGTYHDLLKIIKDKDFLDNEENEDILEDIVLTLTLFEDREMI |
| | | EERLKTYAHLFDDKVMKQLKRRRYTGWGRLSRKLINGIRDKQSGKTILDFLKSDGF |
| | | ANRNFMQLIHDDSLTFKEDIQKAQVSGQGDSLHEHIANLAGSPAIKKGILQTVKVVD |
| | | ELVKVMGRHKPENIVIEMARENQTTQKGQKNSRERMKRIEEGIKELGSQILKEHPVE |
| | | NTQLQNEKLYLYYLQNGRDMYVDQELDINRLSDYDVDAIVPQSFLKDDSIDNKVLT |
| | | RSDKNRGKSDNVPSEEVVKKMKNYWRQLLNAKLITQRKFDNLTKAERGGLSELDK |
| | | AGFIKRQLVETRQITKHVAQILDSRMNTKYDENDKLIREVKVITLKSKLVSDFRKDF |
| | | QFYKVREINNYHHAHDAYLNAVVGTALIKKYPKLESEFVYGDYKVYDVRKMIAKS |
| | | EQEIGKATAKYFFYSNIMNFFKTEITLANGEIRKRPLIETNGETGEIVWDKGRDFATV |
| | | RKVLSMPQVNIVKKTEVQTGGFSKESILPKRNSDKLIARKKDWDPKKYGGFDSPTV |
| | | AYSVLVVAKVEKGKSKKLKSVKELLGITIMERSSFEKNPIDFLEAKGYKEVKKDLIIK |
| | | LPKYSLFELENGRKRMLASAGELQKGNELALPSKYVNFLYLASHYEKLKGSPEDNE |
| | | QKQLFVEQHKHYLDEIIEQISEFSKRVILADANLDKVLSAYNKHRDKPIREQAENIIH |
| | | LFTLTNLGAPAAFKYFDTTIDRKRYTSTKEVLDATLIHQSITGLYETRIDLSQLGGD |
| 3583 | WT sluCas9 | MNQKFILGLDIGITSVGYGLIDYETKNIIDAGVRLFPEANVENNEGRRSKRGSRRLKR |
| | (recognized NNGG | RRIHRLERVKKLLEDYNLLDQSQIPQSTNPYAIRVKGLSEALSKDELVIALLHIAKRR |
| | PAM) | GIHKIDVIDSNDDVGNELSTKEQLNKNSKLLKDKFVCQIQLERMNEGQVRGEKNRF |
| | | KTADIIKEIIQLLNVQKNFHQLDENFINKYIELVEMRREYFEGPGKGSPYGWEGDPKA |
| | | WYETLMGHCTYFPDELRSVKYAYSADLFNALNDLNNLVIQRDGLSKLEYHEKYHII |
| | | ENVFKQKKKPTLKQIANEINVNPEDIKGYRITKSGKPQFTEFKLYHDLKSVLFDQSIL |
| | | ENEDVLDQIAEILTIYQDKDSIKSKLTELDILLNEEDKENIAQLTGYTGTHRLSLKCIR |
| | | LVLEEQWYSSRNQMEIFTHLNIKPKKINLTAANKIPKAMIDEFILSPVVKRTFGQAIN |
| | | LINKIIEKYGVPEDIIIELARENNSKDKQKFINEMQKKNENTRKRINEIIGKYGNQNAK |
| | | RLVEKIRLHDEQEGKCLYSLESIPLEDLLNNPNHYEVDHIIPRSVSFDNSYHNKVLVK |
| | | QSENSKKSNLTPYQYFNSGKSKLSYNQFKQHILNLSKSQDRISKKKKEYLLEERDIN |
| | | KFEVQKEFINRNLVDTRYATRELTNYLKAYFSANNMNVKVKTINGSFTDYLRKVW |
| | | KFKKERNHGYKHHAEDALIIANADFLFKENKKLKAVNSVLEKPEIESKQLDIQVDSE |
| | | DNYSEMFIIPKQVQDIKDFRNFKYSHRVDKKPNRQLINDTLYSTRKKDNSTYIVQTIK |
| | | DIYAKDNTTLKKQFDKSPEKFLMYQHDPRTFEKLEVIMKQYANEKNPLAKYHEETG |
| | | EYLTKYSKKNNGPIVKSLKYIGNKLGSHLDVTHQFKSSTKKLVKLSIKPYRFDVYLT |
| | | DKGYKFITISYLDVLKKDNYYYIPEQKYDKLKLGKAIDKNAKFIASFYKNDLIKLDG |
| | | EIYKIIGVNSDTRNMIELDLPDIRYKEYCELNNIKGEPRIKKTIGKKVNSIEKLTTDVL |
| | | GNVFTNTQYTKPQLLFKRGN |
| 3584 | sluCas9(N582A) | MNQKFILGLDIGITSVGYGLIDYETKNIIDAGVRLFPEANVENNEGRRSKRGSRRLKR |
| | Nickase | RRIHRLERVKKLLEDYNLLDQSQIPQSTNPYAIRVKGLSEALSKDELVIALLHIAKRR |
| | | GIHKIDVIDSNDDVGNELSTKEQLNKNSKLLKDKFVCQIQLERMNEGQVRGEKNRF |
| | | KTADIIKEIIQLLNVQKNFHQLDENFINKYIELVEMRREYFEGPGKGSPYGWEGDPKA |
| | | WYETLMGHCTYFPDELRSVKYAYSADLFNALNDLNNLVIQRDGLSKLEYHEKYHII |
| | | ENVFKQKKKPTLKQIANEINVNPEDIKGYRITKSGKPQFTEFKLYHDLKSVLFDQSIL |
| | | ENEDVLDQIAEILTIYQDKDSIKSKLTELDILLNEEDKENIAQLTGYTGTHRLSLKCIR |
| | | LVLEEQWYSSRNQMEIFTHLNIKPKKINLTAANKIPKAMIDEFILSPVVKRTFGQAIN |
| | | LINKIIEKYGVPEDIIIELARENNSKDKQKFINEMQKKNENTRKRINEIIGKYGNQNAK |
| | | RLVEKIRLHDEQEGKCLYSLESIPLEDLLNNPNHYEVDHIIPRSVSFDNSYHNKVLVK |
| | | QSEASKKSNLTPYQYFNSGKSKLSYNQFKQHILNLSKSQDRISKKKKEYLLEERDIN |
| | | KFEVQKEFINRNLVDTRYATRELTNYLKAYFSANNMNVKVKTINGSFTDYLRKVW |
| | | KFKKERNHGYKHHAEDALIIANADFLFKENKKLKAVNSVLEKPEIESKQLDIQVDSE |
| | | DNYSEMFIIPKQVQDIKDFRNFKYSHRVDKKPNRQLINDTLYSTRKKDNSTYIVQTIK |
| | | DIYAKDNTTLKKQFDKSPEKFLMYQHDPRTFEKLEVIMKQYANEKNPLAKYHEETG |
| | | EYLTKYSKKNNGPIVKSLKYIGNKLGSHLDVTHQFKSSTKKLVKLSIKPYRFDVYLT |
| | | DKGYKFITISYLDVLKKDNYYYIPEQKYDKLKLGKAIDKNAKFIASFYKNDLIKLDG |
| | | EIYKIIGVNSDTRNMIELDLPDIRYKEYCELNNIKGEPRIKKTIGKKVNSIEKLTTDVL |
| | | GNVFTNTQYTKPQLLFKRGN |
| 3585 | Met(−) sluCas9 | NQKFILGLDIGITSVGYGLIDYETKNIIDAGVRLFPEANVENNEGRRSKRGSRRLKRR |
| | ( )Nickase | RIHRLERVKKLLEDYNLLDQSQIPQSTNPYAIRVKGLSEALSKDELVIALLHIAKRRGI |
| | | HKIDVIDSNDDVGNELSTKEQLNKNSKLLKDKFVCQIQLERMNEGQVRGEKNRFKT |
| | | ADIIKEIIQLLNVQKNFHQLDENFINKYIELVEMRREYFEGPGKGSPYGWEGDPKAW |
| | | YETLMGHCTYFPDELRSVKYAYSADLFNALNDLNNLVIQRDGLSKLEYHEKYHIIEN |
| | | VFKQKKKPTLKQIANEINVNPEDIKGYRITKSGKPQFTEFKLYHDLKSVLFDQSILEN |
| | | EDVLDQIAEILTIYQDKDSIKSKLTELDILLNEEDKENIAQLTGYTGTHRLSLKCIRLV |
| | | LEEQWYSSRNQMEIFTHLNIKPKKINLTAANKIPKAMIDEFILSPVVKRTFGQAINLIN |
| | | KIIEKYGVPEDIIIELARENNSKDKQKFINEMQKKNENTRKRINEIIGKYGNQNAKRL |
| | | VEKIRLHDEQEGKCLYSLESIPLEDLLNNPNHYEVDHIIPRSVSFDNSYHNKVLVKQS |
| | | EASKKSNLTPYQYFNSGKSKLSYNQFKQHILNLSKSQDRISKKKKEYLLEERDINKFE |
| | | VQKEFINRNLVDTRYATRELTNYLKAYFSANNMNVKVKTINGSFTDYLRKVWKFK |
| | | KERNHGYKHHAEDALIIANADFLFKENKKLKAVNSVLEKPEIESKQLDIQVDSEDNY |
| | | SEMFIIPKQVQDIKDFRNFKYSHRVDKKPNRQLINDTLYSTRKKDNSTYIVQTIKDIY |
| | | AKDNTTLKKQFDKSPEKFLMYQHDPRTFEKLEVIMKQYANEKNPLAKYHEETGEY |
| | | LTKYSKKNNGPIVKSLKYIGNKLGSHLDVTHQFKSSTKKLVKLSIKPYRFDVYLTDK |
| | | GYKFITISYLDVLKKDNYYYIPEQKYDKLKLGKAIDKNAKFIASFYKNDLIKLDGEIY |
| | | KIIGVNSDTRNMIELDLPDIRYKEYCELNNIKGEPRIKKTIGKKVNSIEKLTTDVLGNV |
| | | FTNTQYTKPQLLFKRGN |
| 3586 | Staphylococcus | MKRNYILGLDIGITSVGYGIIDYETRDVIDAGVRLFKEANVENNEGRRSKRGARRLK |
| | aureus Cas9 | RRRRHRIQRVKKLLFDYNLLTDHSELSGINPYEARVKGLSQKLSEEEFSAALLHLAK |
| | (saCas9) | RRGVHNVNEVEEDTGNELSTKEQISRNSKALEEKYVAELQLERLKKDGEVRGSINRF |
| | | KTSDYVKEAKQLLKVQKAYHQLDQSFIDTYIDLLETRRTYYEGPGEGSPFGWKDIK |
| | | EWYEMLMGHCTYFPEELRSVKYAYNADLYNALNDLNNLVITRDENEKLEYYEKFQ |
| | | IIENVFKQKKKPTLKQIAKEILVNEEDIKGYRVTSTGKPEFTNLKVYHDIKDITARKEII |
| | | ENAELLDQIAKILTIYQSSEDIQEELTNLNSELTQEEIEQISNLKGYTGTHNLSLKAINL |
| | | ILDELWHTNDNQIAIFNRLKLVPKKVDLSQQKEIPTTLVDDFILSPVVKRSFIQSIKVIN |
| | | AIIKKYGLPNDIIIELAREKNSKDAQKMINEMQKRNRQTNERIEEIIRTTGKENAKYLI |
| | | EKIKLHDMQEGKCLYSLEAIPLEDLLNNPFNYEVDHIIPRSVSFDNSFNNKVLVKQEE |
| | | NSKKGNRTPFQYLSSSDSKISYETFKKHILNLAKGKGRISKTKKEYLLEERDINRFSV |
| | | QKDFINRNLVDTRYATRGLMNLLRSYFRVNNLDVKVKSINGGFTSFLRRKWKFKKE |
| | | RNKGYKHHAEDALIIANADFIFKEWKKLDKAKKVMENQMFEEKQAESMPEIETEQE |
| | | YKEIFITPHQIKHIKDFKDYKYSHRVDKKPNRELINDTLYSTRKDDKGNTLIVNNLNG |
| | | LYDKDNDKLKKLINKSPEKLLMYHHDPQTYQKLKLIMEQYGDEKNPLYKYYEETG |
| | | NYLTKYSKKDNGPVIKKIKYYGNKLNAHLDITDDYPNSRNKVVKLSLKPYRFDVYL |
| | | DNGVYKFVTVKNLDVIKKENYYEVNSKCYEEAKKLKKISNQAEFIASFYNNDLIKIN |
| | | GELYRVIGVNNDLLNRIEVNMIDITYREYLENMNDKRPPRIIKTIASKTQSIKKYSTDI |
| | | LGNLYEVKSKKHPQIIKKG |
| 3587 | DO NOT | DO NOT INCLUDE and DELETE FROM SPECIFICATION |
| | INCLUDE- | |
| | replacement saCas9 | |
| | Nickase sequence | |
| | provided below. | |
| 3588 | saCas9 (N580A) | MKRNYILGLDIGITSVGYGIIDYETRDVIDAGVRLFKEANVENNEGRRSKRGARRLK |
| | Nickase | RRRRHRIQRVKKLLFDYNLLTDHSELSGINPYEARVKGLSQKLSEEEFSAALLHLAK |
| | | RRGVHNVNEVEEDTGNELSTKEQISRNSKALEEKYVAELQLERLKKDGEVRGSINRF |
| | | KTSDYVKEAKQLLKVQKAYHQLDQSFIDTYIDLLETRRTYYEGPGEGSPFGWKDIK |
| | | EWYEMLMGHCTYFPEELRSVKYAYNADLYNALNDLNNLVITRDENEKLEYYEKFQ |
| | | IIENVFKQKKKPTLKQIAKEILVNEEDIKGYRVTSTGKPEFTNLKVYHDIKDITARKEII |
| | | ENAELLDQIAKILTIYQSSEDIQEELTNLNSELTQEEIEQISNLKGYTGTHNLSLKAINL |
| | | ILDELWHTNDNQIAIFNRLKLVPKKVDLSQQKEIPTTLVDDFILSPVVKRSFIQSIKVIN |
| | | AIIKKYGLPNDIIIELAREKNSKDAQKMINEMQKRNRQTNERIEEIIRTTGKENAKYLI |
| | | EKIKLHDMQEGKCLYSLEAIPLEDLLNNPFNYEVDHIIPRSVSFDNSFNNKVLVKQEE |
| | | ASKKGNRTPFQYLSSSDSKISYETFKKHILNLAKGKGRISKTKKEYLLEERDINRFSV |
| | | QKDFINRNLVDTRYATRGLMNLLRSYFRVNNLDVKVKSINGGFTSFLRRKWKFKKE |
| | | RNKGYKHHAEDALIIANADFIFKEWKKLDKAKKVMENQMFEEKQAESMPEIETEQE |
| | | YKEIFITPHQIKHIKDFKDYKYSHRVDKKPNRELINDTLYSTRKDDKGNTLIVNNLNG |
| | | LYDKDNDKLKKLINKSPEKLLMYHHDPQTYQKLKLIMEQYGDEKNPLYKYYEETG |
| | | NYLTKYSKKDNGPVIKKIKYYGNKLNAHLDITDDYPNSRNKVVKLSLKPYRFDVYL |
| | | DNGVYKFVTVKNLDVIKKENYYEVNSKCYEEAKKLKKISNQAEFIASFYNNDLIKIN |
| | | GELYRVIGVNNDLLNRIEVNMIDITYREYLENMNDKRPPRIIKTIASKTQSIKKYSTDI |
| | | LGNLYEVKSKKHPQIIKKG |
| 3589 | Met(−) | KRNYILGLDIGITSVGYGIIDYETRDVIDAGVRLFKEANVENNEGRRSKRGARRLKR |
| | saCas9(N579A) | RRRHRIQRVKKLLFDYNLLTDHSELSGINPYEARVKGLSQKLSEEEFSAALLHLAKR |
| | Nickase | RGVHNVNEVEEDTGNELSTKEQISRNSKALEEKYVAELQLERLKKDGEVRGSINRF |
| | | KTSDYVKEAKQLLKVQKAYHQLDQSFIDTYIDLLETRRTYYEGPGEGSPFGWKDIK |
| | | EWYEMLMGHCTYFPEELRSVKYAYNADLYNALNDLNNLVITRDENEKLEYYEKFQ |
| | | IIENVFKQKKKPTLKQIAKEILVNEEDIKGYRVTSTGKPEFTNLKVYHDIKDITARKEII |
| | | ENAELLDQIAKILTIYQSSEDIQEELTNLNSELTQEEIEQISNLKGYTGTHNLSLKAINL |
| | | ILDELWHTNDNQIAIFNRLKLVPKKVDLSQQKEIPTTLVDDFILSPVVKRSFIQSIKVIN |
| | | AIIKKYGLPNDIIIELAREKNSKDAQKMINEMQKRNRQTNERIEEIIRTTGKENAKYLI |
| | | EKIKLHDMQEGKCLYSLEAIPLEDLLNNPFNYEVDHIIPRSVSFDNSFNNKVLVKQEE |
| | | ASKKGNRTPFQYLSSSDSKISYETFKKHILNLAKGKGRISKTKKEYLLEERDINRFSV |
| | | QKDFINRNLVDTRYATRGLMNLLRSYFRVNNLDVKVKSINGGFTSFLRRKWKFKKE |
| | | RNKGYKHHAEDALIIANADFIFKEWKKLDKAKKVMENQMFEEKQAESMPEIETEQE |
| | | YKEIFITPHQIKHIKDFKDYKYSHRVDKKPNRELINDTLYSTRKDDKGNTLIVNNLNG |
| | | LYDKDNDKLKKLINKSPEKLLMYHHDPQTYQKLKLIMEQYGDEKNPLYKYYEETG |
| | | NYLTKYSKKDNGPVIKKIKYYGNKLNAHLDITDDYPNSRNKVVKLSLKPYRFDVYL |
| | | DNGVYKFVTVKNLDVIKKENYYEVNSKCYEEAKKLKKISNQAEFIASFYNNDLIKIN |
| | | GELYRVIGVNNDLLNRIEVNMIDITYREYLENMNDKRPPRIIKTIASKTQSIKKYSTDI |
| | | LGNLYEVKSKKHPQIIKKG |
| 3590 | spCas9-NG | MDKKYSIGLDIGTNSVGWAVITDEYKVPSKKFKVLGNTDRHSIKKNLIGALLFDSGE |
| | | TAEATRLKRTARRRYTRRKNRICYLQEIFSNEMAKVDDSFFHRLEESFLVEEDKKHE |
| | | RHPIFGNIVDEVAYHEKYPTIYHLRKKLVDSTDKADLRLIYLALAHMIKFRGHFLIEG |
| | | DLNPDNSDVDKLFIQLVQTYNQLFEENPINASGVDAKAILSARLSKSRRLENLIAQLP |
| | | GEKKNGLFGNLIALSLGLTPNFKSNFDLAEDAKLQLSKDTYDDDLDNLLAQIGDQY |
| | | ADLFLAAKNLSDAILLSDILRVNTEITKAPLSASMIKRYDEHHQDLTLLKALVRQQLP |
| | | EKYKEIFFDQSKNGYAGYIDGGASQEEFYKFIKPILEKMDGTEELLVKLNREDLLRK |
| | | QRTFDNGSIPHQIHLGELHAILRRQEDFYPFLKDNREKIEKILTFRIPYYVGPLARGNS |
| | | RFAWMTRKSEETITPWNFEEVVDKGASAQSFIERMTNFDKNLPNEKVLPKHSLLYE |
| | | YFTVYNELTKVKYVTEGMRKPAFLSGEQKKAIVDLLFKTNRKVTVKQLKEDYFKKI |
| | | ECFDSVEISGVEDRFNASLGTYHDLLKIIKDKDFLDNEENEDILEDIVLTLTLFEDREM |
| | | IEERLKTYAHLFDDKVMKQLKRRRYTGWGRLSRKLINGIRDKQSGKTILDFLKSDGF |
| | | ANRNFMQLIHDDSLTFKEDIQKAQVSGQGDSLHEHIANLAGSPAIKKGILQTVKVVD |
| | | ELVKVMGRHKPENIVIEMARENQTTQKGQKNSRERMKRIEEGIKELGSQILKEHPVE |
| | | NTQLQNEKLYLYYLQNGRDMYVDQELDINRLSDYDVDHIVPQSFLKDDSIDNKVLT |
| | | RSDKNRGKSDNVPSEEVVKKMKNYWRQLLNAKLITQRKFDNLTKAERGGLSELDK |
| | | AGFIKRQLVETRQITKHVAQILDSRMNTKYDENDKLIREVKVITLKSKLVSDFRKDF |
| | | QFYKVREINNYHHAHDAYLNAVVGTALIKKYPKLESEFVYGDYKVYDVRKMIAKS |
| | | EQEIGKATAKYFFYSNIMNFFKTEITLANGEIRKRPLIETNGETGEIVWDKGRDFATV |
| | | RKVLSMPQVNIVKKTEVQTGGFSKESIRPKRNSDKLIARKKDWDPKKYGGFVSPTV |
| | | AYSVLVVAKVEKGKSKKLKSVKELLGITIMERSSFEKNPIDFLEAKGYKEVKKDLIIK |
| | | LPKYSLFELENGRKRMLASARFLQKGNELALPSKYVNFLYLASHYEKLKGSPEDNE |
| 3591 | spCas9-NG | QKQLFVEQHKHYLDEIIEQISEFSKRVILADANLDKVLSAYNKHRDKPIREQAENIIH |
| | (H840A) Nickase | LFTLTNLGAPRAFKYFDTTIDRKVYRSTKEVLDATLIHQSITGLYETRIDLSQLGGD |
| | | MDKKYSIGLDIGTNSVGWAVITDEYKVPSKKFKVLGNTDRHSIKKNLIGALLFDSGE |
| | | TAEATRLKRTARRRYTRRKNRICYLQEIFSNEMAKVDDSFFHRLEESFLVEEDKKHE |
| | | RHPIFGNIVDEVAYHEKYPTIYHLRKKLVDSTDKADLRLIYLALAHMIKFRGHFLIEG |
| | | DLNPDNSDVDKLFIQLVQTYNQLFEENPINASGVDAKAILSARLSKSRRLENLIAQLP |
| | | GEKKNGLFGNLIALSLGLTPNFKSNFDLAEDAKLQLSKDTYDDDLDNLLAQIGDQY |
| | | ADLFLAAKNLSDAILLSDILRVNTEITKAPLSASMIKRYDEHHQDLTLLKALVRQQLP |
| | | EKYKEIFFDQSKNGYAGYIDGGASQEEFYKFIKPILEKMDGTEELLVKLNREDLLRK |
| | | QRTFDNGSIPHQIHLGELHAILRRQEDFYPFLKDNREKIEKILTFRIPYYVGPLARGNS |
| | | RFAWMTRKSEETITPWNFEEVVDKGASAQSFIERMTNFDKNLPNEKVLPKHSLLYE |
| | | YFTVYNELTKVKYVTEGMRKPAFLSGEQKKAIVDLLFKTNRKVTVKQLKEDYFKKI |
| | | ECFDSVEISGVEDRFNASLGTYHDLLKIIKDKDFLDNEENEDILEDIVLTLTLFEDREM |
| | | IEERLKTYAHLFDDKVMKQLKRRRYTGWGRLSRKLINGIRDKQSGKTILDFLKSDGF |
| | | ANRNFMQLIHDDSLTFKEDIQKAQVSGQGDSLHEHIANLAGSPAIKKGILQTVKVVD |
| | | ELVKVMGRHKPENIVIEMARENQTTQKGQKNSRERMKRIEEGIKELGSQILKEHPVE |
| | | NTQLQNEKLYLYYLQNGRDMYVDQELDINRLSDYDVDAIVPQSFLKDDSIDNKVLT |
| | | RSDKNRGKSDNVPSEEVVKKMKNYWRQLLNAKLITQRKFDNLTKAERGGLSELDK |
| | | AGFIKRQLVETRQITKHVAQILDSRMNTKYDENDKLIREVKVITLKSKLVSDFRKDF |
| | | QFYKVREINNYHHAHDAYLNAVVGTALIKKYPKLESEFVYGDYKVYDVRKMIAKS |
| | | EQEIGKATAKYFFYSNIMNFFKTEITLANGEIRKRPLIETNGETGEIVWDKGRDFATV |
| 3592 | spCas9-NG | RKVLSMPQVNIVKKTEVQTGGFSKESIRPKRNSDKLIARKKDWDPKKYGGFVSPTV |
| | (H840A) Nickase | AYSVLVVAKVEKGKSKKLKSVKELLGITIMERSSFEKNPIDFLEAKGYKEVKKDLIIK |
| | | LPKYSLFELENGRKRMLASARFLQKGNELALPSKYVNFLYLASHYEKLKGSPEDNE |
| | | QKQLFVEQHKHYLDEIIEQISEFSKRVILADANLDKVLSAYNKHRDKPIREQAENIIH |
| | | LFTLTNLGAPRAFKYFDTTIDRKVYRSTKEVLDATLIHQSITGLYETRIDLSQLGGD |
| | | DKKYSIGLDIGTNSVGWAVITDEYKVPSKKFKVLGNTDRHSIKKNLIGALLFDSGET |
| | | AEATRLKRTARRRYTRRKNRICYLQEIFSNEMAKVDDSFFHRLEESFLVEEDKKHER |
| | | HPIFGNIVDEVAYHEKYPTIYHLRKKLVDSTDKADLRLIYLALAHMIKFRGHFLIEGD |
| | | LNPDNSDVDKLFIQLVQTYNQLFEENPINASGVDAKAILSARLSKSRRLENLIAQLPG |
| | | EKKNGLFGNLIALSLGLTPNFKSNFDLAEDAKLQLSKDTYDDDLDNLLAQIGDQYA |
| | | DLFLAAKNLSDAILLSDILRVNTEITKAPLSASMIKRYDEHHQDLTLLKALVRQQLPE |
| | | KYKEIFFDQSKNGYAGYIDGGASQEEFYKFIKPILEKMDGTEELLVKLNREDLLRKQ |
| | | RTFDNGSIPHQIHLGELHAILRRQEDFYPFLKDNREKIEKILTFRIPYYVGPLARGNSR |
| | | FAWMTRKSEETITPWNFEEVVDKGASAQSFIERMTNFDKNLPNEKVLPKHSLLYEY |
| | | FTVYNELTKVKYVTEGMRKPAFLSGEQKKAIVDLLFKTNRKVTVKQLKEDYFKKIE |
| | | CFDSVEISGVEDRFNASLGTYHDLLKIIKDKDFLDNEENEDILEDIVLTLTLFEDREMI |
| | | EERLKTYAHLFDDKVMKQLKRRRYTGWGRLSRKLINGIRDKQSGKTILDFLKSDGF |
| | | ANRNFMQLIHDDSLTFKEDIQKAQVSGQGDSLHEHIANLAGSPAIKKGILQTVKVVD |
| | | ELVKVMGRHKPENIVIEMARENQTTQKGQKNSRERMKRIEEGIKELGSQILKEHPVE |
| | | NTQLQNEKLYLYYLQNGRDMYVDQELDINRLSDYDVDAIVPQSFLKDDSIDNKVLT |
| | | RSDKNRGKSDNVPSEEVVKKMKNYWRQLLNAKLITQRKFDNLTKAERGGLSELDK |
| | | AGFIKRQLVETRQITKHVAQILDSRMNTKYDENDKLIREVKVITLKSKLVSDFRKDF |
| | | QFYKVREINNYHHAHDAYLNAVVGTALIKKYPKLESEFVYGDYKVYDVRKMIAKS |
| | | EQEIGKATAKYFFYSNIMNFFKTEITLANGEIRKRPLIETNGETGEIVWDKGRDFATV |
| 3593 | spCas9-VRQR | RKVLSMPQVNIVKKTEVQTGGFSKESIRPKRNSDKLIARKKDWDPKKYGGFVSPTV |
| | | AYSVLVVAKVEKGKSKKLKSVKELLGITIMERSSFEKNPIDFLEAKGYKEVKKDLIIK |
| | | LPKYSLFELENGRKRMLASARFLQKGNELALPSKYVNFLYLASHYEKLKGSPEDNE |
| | | QKQLFVEQHKHYLDEIIEQISEFSKRVILADANLDKVLSAYNKHRDKPIREQAENIIH |
| | | LFTLTNLGAPRAFKYFDTTIDRKVYRSTKEVLDATLIHQSITGLYETRIDLSQLGGD |
| | | MDKKYSIGLDIGTNSVGWAVITDEYKVPSKKFKVLGNTDRHSIKKNLIGALLFDSGE |
| | | TAEATRLKRTARRRYTRRKNRICYLQEIFSNEMAKVDDSFFHRLEESFLVEEDKKHE |
| | | RHPIFGNIVDEVAYHEKYPTIYHLRKKLVDSTDKADLRLIYLALAHMIKFRGHFLIEG |
| | | DLNPDNSDVDKLFIQLVQTYNQLFEENPINASGVDAKAILSARLSKSRRLENLIAQLP |
| | | GEKKNGLFGNLIALSLGLTPNFKSNFDLAEDAKLQLSKDTYDDDLDNLLAQIGDQY |
| | | ADLFLAAKNLSDAILLSDILRVNTEITKAPLSASMIKRYDEHHQDLTLLKALVRQQLP |
| | | EKYKEIFFDQSKNGYAGYIDGGASQEEFYKFIKPILEKMDGTEELLVKLNREDLLRK |
| | | QRTFDNGSIPHQIHLGELHAILRRQEDFYPFLKDNREKIEKILTFRIPYYVGPLARGNS |
| | | RFAWMTRKSEETITPWNFEEVVDKGASAQSFIERMTNFDKNLPNEKVLPKHSLLYE |
| | | YFTVYNELTKVKYVTEGMRKPAFLSGEQKKAIVDLLFKTNRKVTVKQLKEDYFKKI |
| | | ECFDSVEISGVEDRFNASLGTYHDLLKIIKDKDFLDNEENEDILEDIVLTLTLFEDREM |
| | | IEERLKTYAHLFDDKVMKQLKRRRYTGWGRLSRKLINGIRDKQSGKTILDFLKSDGF |
| | | ANRNFMQLIHDDSLTFKEDIQKAQVSGQGDSLHEHIANLAGSPAIKKGILQTVKVVD |
| | | ELVKVMGRHKPENIVIEMARENQTTQKGQKNSRERMKRIEEGIKELGSQILKEHPVE |
| | | NTQLQNEKLYLYYLQNGRDMYVDQELDINRLSDYDVDHIVPQSFLKDDSIDNKVLT |
| | | RSDKNRGKSDNVPSEEVVKKMKNYWRQLLNAKLITQRKFDNLTKAERGGLSELDK |
| | | AGFIKRQLVETRQITKHVAQILDSRMNTKYDENDKLIREVKVITLKSKLVSDFRKDF |
| | | QFYKVREINNYHHAHDAYLNAVVGTALIKKYPKLESEFVYGDYKVYDVRKMIAKS |
| | | EQEIGKATAKYFFYSNIMNFFKTEITLANGEIRKRPLIETNGETGEIVWDKGRDFATV |
| 3594 | spCas9-VRQR | RKVLSMPQVNIVKKTEVQTGGFSKESILPKRNSDKLIARKKDWDPKKYGGFVSPTV |
| | (H840A) Nickase | AYSVLVVAKVEKGKSKKLKSVKELLGITIMERSSFEKNPIDFLEAKGYKEVKKDLIIK |
| | | LPKYSLFELENGRKRMLASARELQKGNELALPSKYVNFLYLASHYEKLKGSPEDNE |
| | | QKQLFVEQHKHYLDEIIEQISEFSKRVILADANLDKVLSAYNKHRDKPIREQAENIIH |
| | | LFTLTNLGAPAAFKYFDTTIDRKQYRSTKEVLDATLIHQSITGLYETRIDLSQLGGD |
| | | MDKKYSIGLDIGTNSVGWAVITDEYKVPSKKFKVLGNTDRHSIKKNLIGALLFDSGE |
| | | TAEATRLKRTARRRYTRRKNRICYLQEIFSNEMAKVDDSFFHRLEESFLVEEDKKHE |
| | | RHPIFGNIVDEVAYHEKYPTIYHLRKKLVDSTDKADLRLIYLALAHMIKFRGHFLIEG |
| | | DLNPDNSDVDKLFIQLVQTYNQLFEENPINASGVDAKAILSARLSKSRRLENLIAQLP |
| | | GEKKNGLFGNLIALSLGLTPNFKSNFDLAEDAKLQLSKDTYDDDLDNLLAQIGDQY |
| | | ADLFLAAKNLSDAILLSDILRVNTEITKAPLSASMIKRYDEHHQDLTLLKALVRQQLP |
| | | EKYKEIFFDQSKNGYAGYIDGGASQEEFYKFIKPILEKMDGTEELLVKLNREDLLRK |
| | | QRTFDNGSIPHQIHLGELHAILRRQEDFYPFLKDNREKIEKILTFRIPYYVGPLARGNS |
| | | RFAWMTRKSEETITPWNFEEVVDKGASAQSFIERMTNFDKNLPNEKVLPKHSLLYE |
| | | YFTVYNELTKVKYVTEGMRKPAFLSGEQKKAIVDLLFKTNRKVTVKQLKEDYFKKI |
| | | ECFDSVEISGVEDRFNASLGTYHDLLKIIKDKDFLDNEENEDILEDIVLTLTLFEDREM |
| | | IEERLKTYAHLFDDKVMKQLKRRRYTGWGRLSRKLINGIRDKQSGKTILDFLKSDGF |
| | | ANRNFMQLIHDDSLTFKEDIQKAQVSGQGDSLHEHIANLAGSPAIKKGILQTVKVVD |
| | | ELVKVMGRHKPENIVIEMARENQTTQKGQKNSRERMKRIEEGIKELGSQILKEHPVE |
| | | NTQLQNEKLYLYYLQNGRDMYVDQELDINRLSDYDVDAIVPQSFLKDDSIDNKVLT |
| | | RSDKNRGKSDNVPSEEVVKKMKNYWRQLLNAKLITQRKFDNLTKAERGGLSELDK |
| | | AGFIKRQLVETRQITKHVAQILDSRMNTKYDENDKLIREVKVITLKSKLVSDFRKDF |
| | | QFYKVREINNYHHAHDAYLNAVVGTALIKKYPKLESEFVYGDYKVYDVRKMIAKS |
| | | EQEIGKATAKYFFYSNIMNFFKTEITLANGEIRKRPLIETNGETGEIVWDKGRDFATV |
| 3595 | Met(−) spCas9- | RKVLSMPQVNIVKKTEVQTGGFSKESILPKRNSDKLIARKKDWDPKKYGGFVSPTV |
| | VRQR (H839A) | AYSVLVVAKVEKGKSKKLKSVKELLGITIMERSSFEKNPIDFLEAKGYKEVKKDLIIK |
| | Nickase | LPKYSLFELENGRKRMLASARELQKGNELALPSKYVNFLYLASHYEKLKGSPEDNE |
| | | QKQLFVEQHKHYLDEIIEQISEFSKRVILADANLDKVLSAYNKHRDKPIREQAENIIH |
| | | LFTLTNLGAPAAFKYFDTTIDRKQYRSTKEVLDATLIHQSITGLYETRIDLSQLGGD |
| | | DKKYSIGLDIGTNSVGWAVITDEYKVPSKKFKVLGNTDRHSIKKNLIGALLFDSGET |
| | | AEATRLKRTARRRYTRRKNRICYLQEIFSNEMAKVDDSFFHRLEESFLVEEDKKHER |
| | | HPIFGNIVDEVAYHEKYPTIYHLRKKLVDSTDKADLRLIYLALAHMIKFRGHFLIEGD |
| | | LNPDNSDVDKLFIQLVQTYNQLFEENPINASGVDAKAILSARLSKSRRLENLIAQLPG |
| | | EKKNGLFGNLIALSLGLTPNFKSNFDLAEDAKLQLSKDTYDDDLDNLLAQIGDQYA |
| | | DLFLAAKNLSDAILLSDILRVNTEITKAPLSASMIKRYDEHHQDLTLLKALVRQQLPE |
| | | KYKEIFFDQSKNGYAGYIDGGASQEEFYKFIKPILEKMDGTEELLVKLNREDLLRKQ |
| | | RTFDNGSIPHQIHLGELHAILRRQEDFYPFLKDNREKIEKILTFRIPYYVGPLARGNSR |
| | | FAWMTRKSEETITPWNFEEVVDKGASAQSFIERMTNFDKNLPNEKVLPKHSLLYEY |
| | | FTVYNELTKVKYVTEGMRKPAFLSGEQKKAIVDLLFKTNRKVTVKQLKEDYFKKIE |
| | | CFDSVEISGVEDRFNASLGTYHDLLKIIKDKDFLDNEENEDILEDIVLTLTLFEDREMI |
| | | EERLKTYAHLFDDKVMKQLKRRRYTGWGRLSRKLINGIRDKQSGKTILDFLKSDGF |
| | | ANRNFMQLIHDDSLTFKEDIQKAQVSGQGDSLHEHIANLAGSPAIKKGILQTVKVVD |
| | | ELVKVMGRHKPENIVIEMARENQTTQKGQKNSRERMKRIEEGIKELGSQILKEHPVE |
| | | NTQLQNEKLYLYYLQNGRDMYVDQELDINRLSDYDVDAIVPQSFLKDDSIDNKVLT |
| | | RSDKNRGKSDNVPSEEVVKKMKNYWRQLLNAKLITQRKFDNLTKAERGGLSELDK |
| | | AGFIKRQLVETRQITKHVAQILDSRMNTKYDENDKLIREVKVITLKSKLVSDFRKDF |
| | | QFYKVREINNYHHAHDAYLNAVVGTALIKKYPKLESEFVYGDYKVYDVRKMIAKS |
| | | EQEIGKATAKYFFYSNIMNFFKTEITLANGEIRKRPLIETNGETGEIVWDKGRDFATV |
| 3596 | SpRY | RKVLSMPQVNIVKKTEVQTGGFSKESILPKRNSDKLIARKKDWDPKKYGGFVSPTV |
| | | AYSVLVVAKVEKGKSKKLKSVKELLGITIMERSSFEKNPIDFLEAKGYKEVKKDLIIK |
| | | LPKYSLFELENGRKRMLASARELQKGNELALPSKYVNFLYLASHYEKLKGSPEDNE |
| | | QKQLFVEQHKHYLDEIIEQISEFSKRVILADANLDKVLSAYNKHRDKPIREQAENIIH |
| | | LFTLTNLGAPAAFKYFDTTIDRKQYRSTKEVLDATLIHQSITGLYETRIDLSQLGGD |
| | | MDKKYSIGLDIGTNSVGWAVITDEYKVPSKKFKVLGNTDRHSIKKNLIGALLFDSGE |
| | | TAERTRLKRTARRRYTRRKNRICYLQEIFSNEMAKVDDSFFHRLEESFL VEEDKKHE |
| | | RHPIFGNIVDEVAYHEKYPTIYHLRKKLVDSTDKADLRLIYLALAHMIKFRGHFLIEG |
| | | DLNPDNSDVDKLFIQLVQTYNQLFEENPINASGVDAKAILSARLSKSRRLENLIAQLP |
| | | GEKKNGLFGNLIALSLGLTPNFKSNFDLAEDAKLQLSKDTYDDDLDNLLAQIGDQY |
| | | ADLFLAAKNLSDAILLSDILRVNTEITKAPLSASMIKRYDEHHQDLTLLKALVRQQLP |
| | | EKYKEIFFDQSKNGYAGYIDGGASQEEFYKFIKPILEKMDGTEELLVKLNREDLLRK |
| | | QRTFDNGSIPHQIHLGELHAILRRQEDFYPFLKDNREKIEKILTFRIPYYVGPLARGNS |
| | | RFAWMTRKSEETITPWNFEEVVDKGASAQSFIERMTNFDKNLPNEKVLPKHSLLYE |
| | | YFTVYNELTKVKYVTEGMRKPAFLSGEQKKAIVDLLFKTNRKVTVKQLKEDYFKKI |
| | | ECFDSVEISGVEDRFNASLGTYHDLLKIIKDKDFLDNEENEDILEDIVLTLTLFEDREM |
| | | IEERLKTYAHLFDDKVMKQLKRRRYTGWGRLSRKLINGIRDKQSGKTILDFLKSDGF |
| | | ANRNFMQLIHDDSLTFKEDIQKAQVSGQGDSLHEHIANLAGSPAIKKGILQTVKVVD |
| | | ELVKVMGRHKPENIVIEMARENQTTQKGQKNSRERMKRIEEGIKELGSQILKEHPVE |
| | | NTQLQNEKLYLYYLQNGRDMYVDQELDINRLSDYDVDHIVPQSFLKDDSIDNKVLT |
| | | RSDKNRGKSDNVPSEEVVKKMKNYWRQLLNAKLITQRKFDNLTKAERGGLSELDK |
| | | AGFIKRQLVETRQITKHVAQILDSRMNTKYDENDKLIREVKVITLKSKLVSDFRKDF |
| | | QFYKVREINNYHHAHDAYLNAVVGTALIKKYPKLESEFVYGDYKVYDVRKMIAKS |
| | | EQEIGKATAKYFFYSNIMNFFKTEITLANGEIRKRPLIETNGETGEIVWDKGRDFATV |
| 3597 | SpRY(H840A) | RKVLSMPQVNIVKKTEVQTGGFSKESIRPKRNSDKLIARKKDWDPKKYGGFLWPTV |
| | Nickase | AYSVLVVAKVEKGKSKKLKSVKELLGITIMERSSFEKNPIDFLEAKGYKEVKKDLIIK |
| | | LPKYSLFELENGRKRMLASAKQLQKGNELALPSKYVNFLYLASHYEKLKGSPEDNE |
| | | QKQLFVEQHKHYLDEIIEQISEFSKRVILADANLDKVLSAYNKHRDKPIREQAENIIH |
| | | LFTLTRLGAPRAFKYFDTTIDPKQYRSTKEVLDATLIHQSITGLYETRIDLSQLGGD |
| | | MDKKYSIGLDIGTNSVGWAVITDEYKVPSKKFKVLGNTDRHSIKKNLIGALLFDSGE |
| | | TAERTRLKRTARRRYTRRKNRICYLQEIFSNEMAKVDDSFFHRLEESFL VEEDKKHE |
| | | RHPIFGNIVDEVAYHEKYPTIYHLRKKLVDSTDKADLRLIYLALAHMIKFRGHFLIEG |
| | | DLNPDNSDVDKLFIQLVQTYNQLFEENPINASGVDAKAILSARLSKSRRLENLIAQLP |
| | | GEKKNGLFGNLIALSLGLTPNFKSNFDLAEDAKLQLSKDTYDDDLDNLLAQIGDQY |
| | | ADLFLAAKNLSDAILLSDILRVNTEITKAPLSASMIKRYDEHHQDLTLLKALVRQQLP |
| | | EKYKEIFFDQSKNGYAGYIDGGASQEEFYKFIKPILEKMDGTEELLVKLNREDLLRK |
| | | QRTFDNGSIPHQIHLGELHAILRRQEDFYPFLKDNREKIEKILTFRIPYYVGPLARGNS |
| | | RFAWMTRKSEETITPWNFEEVVDKGASAQSFIERMTNFDKNLPNEKVLPKHSLLYE |
| | | YFTVYNELTKVKYVTEGMRKPAFLSGEQKKAIVDLLFKTNRKVTVKQLKEDYFKKI |
| | | ECFDSVEISGVEDRFNASLGTYHDLLKIIKDKDFLDNEENEDILEDIVLTLTLFEDREM |
| | | IEERLKTYAHLFDDKVMKQLKRRRYTGWGRLSRKLINGIRDKQSGKTILDFLKSDGF |
| | | ANRNFMQLIHDDSLTFKEDIQKAQVSGQGDSLHEHIANLAGSPAIKKGILQTVKVVD |
| | | ELVKVMGRHKPENIVIEMARENQTTQKGQKNSRERMKRIEEGIKELGSQILKEHPVE |
| | | NTQLQNEKLYLYYLQNGRDMYVDQELDINRLSDYDVDAIVPQSFLKDDSIDNKVLT |
| | | RSDKNRGKSDNVPSEEVVKKMKNYWRQLLNAKLITQRKFDNLTKAERGGLSELDK |
| | | AGFIKRQLVETRQITKHVAQILDSRMNTKYDENDKLIREVKVITLKSKLVSDFRKDF |
| | | QFYKVREINNYHHAHDAYLNAVVGTALIKKYPKLESEFVYGDYKVYDVRKMIAKS |
| | | EQEIGKATAKYFFYSNIMNFFKTEITLANGEIRKRPLIETNGETGEIVWDKGRDFATV |
| 3598 | Met(−) | RKVLSMPQVNIVKKTEVQTGGFSKESIRPKRNSDKLIARKKDWDPKKYGGFLWPTV |
| | SpRY(H839A) | AYSVLVVAKVEKGKSKKLKSVKELLGITIMERSSFEKNPIDFLEAKGYKEVKKDLIIK |
| | Nickase | LPKYSLFELENGRKRMLASAKQLQKGNELALPSKYVNFLYLASHYEKLKGSPEDNE |
| | | QKQLFVEQHKHYLDEIIEQISEFSKRVILADANLDKVLSAYNKHRDKPIREQAENIIH |
| | | LFTLTRLGAPRAFKYFDTTIDPKQYRSTKEVLDATLIHQSITGLYETRIDLSQLGGD |
| | | DKKYSIGLDIGTNSVGWAVITDEYKVPSKKFKVLGNTDRHSIKKNLIGALLFDSGET |
| | | AERTRLKRTARRRYTRRKNRICYLQEIFSNEMAKVDDSFFHRLEESFLVEEDKKHER |
| | | HPIFGNIVDEVAYHEKYPTIYHLRKKLVDSTDKADLRLIYLALAHMIKFRGHFLIEGD |
| | | LNPDNSDVDKLFIQLVQTYNQLFEENPINASGVDAKAILSARLSKSRRLENLIAQLPG |
| | | EKKNGLFGNLIALSLGLTPNFKSNFDLAEDAKLQLSKDTYDDDLDNLLAQIGDQYA |
| | | DLFLAAKNLSDAILLSDILRVNTEITKAPLSASMIKRYDEHHQDLTLLKALVRQQLPE |
| | | KYKEIFFDQSKNGYAGYIDGGASQEEFYKFIKPILEKMDGTEELLVKLNREDLLRKQ |
| | | RTFDNGSIPHQIHLGELHAILRRQEDFYPFLKDNREKIEKILTFRIPYYVGPLARGNSR |
| | | FAWMTRKSEETITPWNFEEVVDKGASAQSFIERMTNFDKNLPNEKVLPKHSLLYEY |
| | | FTVYNELTKVKYVTEGMRKPAFLSGEQKKAIVDLLFKTNRKVTVKQLKEDYFKKIE |
| | | CFDSVEISGVEDRFNASLGTYHDLLKIIKDKDFLDNEENEDILEDIVLTLTLFEDREMI |
| | | EERLKTYAHLFDDKVMKQLKRRRYTGWGRLSRKLINGIRDKQSGKTILDFLKSDGF |
| | | ANRNFMQLIHDDSLTFKEDIQKAQVSGQGDSLHEHIANLAGSPAIKKGILQTVKVVD |
| | | ELVKVMGRHKPENIVIEMARENQTTQKGQKNSRERMKRIEEGIKELGSQILKEHPVE |
| | | NTQLQNEKLYLYYLQNGRDMYVDQELDINRLSDYDVDAIVPQSFLKDDSIDNKVLT |
| | | RSDKNRGKSDNVPSEEVVKKMKNYWRQLLNAKLITQRKFDNLTKAERGGLSELDK |
| | | AGFIKRQLVETRQITKHVAQILDSRMNTKYDENDKLIREVKVITLKSKLVSDFRKDF |
| | | QFYKVREINNYHHAHDAYLNAVVGTALIKKYPKLESEFVYGDYKVYDVRKMIAKS |
| | | EQEIGKATAKYFFYSNIMNFFKTEITLANGEIRKRPLIETNGETGEIVWDKGRDFATV |
| 3599 | SRGN3.1 | RKVLSMPQVNIVKKTEVQTGGFSKESIRPKRNSDKLIARKKDWDPKKYGGFLWPTV |
| | | AYSVLVVAKVEKGKSKKLKSVKELLGITIMERSSFEKNPIDFLEAKGYKEVKKDLIIK |
| | | LPKYSLFELENGRKRMLASAKQLQKGNELALPSKYVNFLYLASHYEKLKGSPEDNE |
| | | QKQLFVEQHKHYLDEIIEQISEFSKRVILADANLDKVLSAYNKHRDKPIREQAENIIH |
| | | LFTLTRLGAPRAFKYFDTTIDPKQYRSTKEVLDATLIHQSITGLYETRIDLSQLGGD |
| | | MNQKFILGLDIGITSVGYGLIDYETKNIIDAGVRLFPEANVENNEGRRSKRGSRRLKR |
| | | RRIHRLERVKLLLTEYDLINKEQIPTSNNPYQIRVKGLSEILSKDELAIALLHLAKRRG |
| | | IHNVDVAADKEETASDSLSTKDQINKNAKFLESRYVCELQKERLENEGHVRGVENR |
| | | FLTKDIVREAKKIIDTQMQYYPEIDETFKEKYISLVETRREYFEGPGQGSPFGWNGDL |
| | | KKWYEMLMGHCTYFPQELRSVKYAYSADLFNALNDLNNLIIQRDNSEKLEYHEKY |
| | | HIIENVFKQKKKPTLKQIAKEIGVNPEDIKGYRITKSGTPEFTSFKLFHDLKKVVKDH |
| | | AILDDIDLLNQIAEILTIYQDKDSIVAELGQLEYLMSEADKQSISELTGYTGTHSLSLK |
| | | CMNMIIDELWHSSMNQMEVFTYLNMRPKKYELKGYQRIPTDMIDDAILSPVVKRTF |
| | | IQSINVINKVIEKYGIPEDIIIELARENNSDDRKKFINNLQKKNEATRKRINEIIGQTGN |
| | | QNAKRIVEKIRLHDQQEGKCLYSLESIPLEDLLNNPNHYEVDHIIPRSVSFDNSYHNK |
| | | VLVKQSENSKKSNLTPYQYFNSGKSKLSYNQFKQHILNLSKSQDRISKKKKEYLLEE |
| | | RDINKFEVQKEFINRNLVDTRYATRELTNYLKAYFSANNMNVKVKTINGSFTDYLR |
| | | KVWKFKKERNHGYKHHAEDALIIANADFLFKENKKLKAVNSVLEKPEIETKQLDIQ |
| | | VDSEDNYSEMFIIPKQVQDIKDFRNFKYSHRVDKKPNRQLINDTLYSTRKKDNSTYI |
| | | VQTIKDIYAKDNTTLKKQFDKSPEKFLMYQHDPRTFEKLEVIMKQYANEKNPLAKY |
| | | HEETGEYLTKYSKKNNGPIVKSLKYIGNKLGSHLDVTHQFKSSTKKLVKLSIKNYRF |
| | | DVYLTEKGYKFVTIAYLNVFKKDNYYYIPKDKYQELKEKKKIKDTDQFIASFYKND |
| | | LIKLNGDLYKIIGVNSDDRNIIELDYYDIKYKDYCEINNIKGEPRIKKTIGKKTESIEKF |
| | | TTDVLGNLYLHSTEKAPQLIFKRGL |
| 3600 | sRGN3.1(N585A) | MNQKFILGLDIGITSVGYGLIDYETKNIIDAGVRLFPEANVENNEGRRSKRGSRRLKR |
| | Nickase | RRIHRLERVKLLLTEYDLINKEQIPTSNNPYQIRVKGLSEILSKDELAIALLHLAKRRG |
| | | IHNVDVAADKEETASDSLSTKDQINKNAKFLESRYVCELQKERLENEGHVRGVENR |
| | | FLTKDIVREAKKIIDTQMQYYPEIDETFKEKYISLVETRREYFEGPGQGSPFGWNGDL |
| | | KKWYEMLMGHCTYFPQELRSVKYAYSADLFNALNDLNNLIIQRDNSEKLEYHEKY |
| | | HIIENVFKQKKKPTLKQIAKEIGVNPEDIKGYRITKSGTPEFTSFKLFHDLKKVVKDH |
| | | AILDDIDLLNQIAEILTIYQDKDSIVAELGQLEYLMSEADKQSISELTGYTGTHSLSLK |
| | | CMNMIIDELWHSSMNQMEVFTYLNMRPKKYELKGYQRIPTDMIDDAILSPVVKRTF |
| | | IQSINVINKVIEKYGIPEDIIIELARENNSDDRKKFINNLQKKNEATRKRINEIIGQTGN |
| | | QNAKRIVEKIRLHDQQEGKCLYSLESIPLEDLLNNPNHYEVDHIIPRSVSFDNSYHNK |
| | | VLVKQSEASKKSNLTPYQYFNSGKSKLSYNQFKQHILNLSKSQDRISKKKKEYLLEE |
| | | RDINKFEVQKEFINRNLVDTRYATRELTNYLKAYFSANNMNVKVKTINGSFTDYLR |
| | | KVWKFKKERNHGYKHHAEDALIIANADFLFKENKKLKAVNSVLEKPEIETKQLDIQ |
| | | VDSEDNYSEMFIIPKQVQDIKDFRNFKYSHRVDKKPNRQLINDTLYSTRKKDNSTYI |
| | | VQTIKDIYAKDNTTLKKQFDKSPEKFLMYQHDPRTFEKLEVIMKQYANEKNPLAKY |
| | | HEETGEYLTKYSKKNNGPIVKSLKYIGNKLGSHLDVTHQFKSSTKKLVKLSIKNYRF |
| | | DVYLTEKGYKFVTIAYLNVFKKDNYYYIPKDKYQELKEKKKIKDTDQFIASFYKND |
| | | LIKLNGDLYKIIGVNSDDRNIIELDYYDIKYKDYCEINNIKGEPRIKKTIGKKTESIEKF |
| | | TTDVLGNLYLHSTEKAPQLIFKRGL |
| 3601 | Met(−) | NQKFILGLDIGITSVGYGLIDYETKNIIDAGVRLFPEANVENNEGRRSKRGSRRLKRR |
| | SRGN3.1(N584A)N | RIHRLERVKLLLTEYDLINKEQIPTSNNPYQIRVKGLSEILSKDELAIALLHLAKRRGI |
| | ickase | HNVDVAADKEETASDSLSTKDQINKNAKFLESRYVCELQKERLENEGHVRGVENRF |
| | | LTKDIVREAKKIIDTQMQYYPEIDETFKEKYISLVETRREYFEGPGQGSPFGWNGDLK |
| | | KWYEMLMGHCTYFPQELRSVKYAYSADLFNALNDLNNLIIQRDNSEKLEYHEKYHI |
| | | IENVFKQKKKPTLKQIAKEIGVNPEDIKGYRITKSGTPEFTSFKLFHDLKKVVKDHAI |
| | | LDDIDLLNQIAEILTIYQDKDSIVAELGQLEYLMSEADKQSISELTGYTGTHSLSLKC |
| | | MNMIIDELWHSSMNQMEVFTYLNMRPKKYELKGYQRIPTDMIDDAILSPVVKRTFI |
| | | QSINVINKVIEKYGIPEDIIIELARENNSDDRKKFINNLQKKNEATRKRINEIIGQTGNQ |
| | | NAKRIVEKIRLHDQQEGKCLYSLESIPLEDLLNNPNHYEVDHIIPRSVSFDNSYHNKV |
| | | LVKQSEASKKSNLTPYQYFNSGKSKLSYNQFKQHILNLSKSQDRISKKKKEYLLEER |
| | | DINKFEVQKEFINRNLVDTRYATRELTNYLKAYFSANNMNVKVKTINGSFTDYLRK |
| | | VWKFKKERNHGYKHHAEDALIIANADFLFKENKKLKAVNSVLEKPEIETKQLDIQV |
| | | DSEDNYSEMFIIPKQVQDIKDFRNFKYSHRVDKKPNRQLINDTLYSTRKKDNSTYIV |
| | | QTIKDIYAKDNTTLKKQFDKSPEKFLMYQHDPRTFEKLEVIMKQYANEKNPLAKYH |
| | | EETGEYLTKYSKKNNGPIVKSLKYIGNKLGSHLDVTHQFKSSTKKLVKLSIKNYRFD |
| | | VYLTEKGYKFVTIAYLNVFKKDNYYYIPKDKYQELKEKKKIKDTDQFIASFYKNDLI |
| | | KLNGDLYKIIGVNSDDRNIIELDYYDIKYKDYCEINNIKGEPRIKKTIGKKTESIEKFTT |
| | | DVLGNLYLHSTEKAPQLIFKRGL |
| 3602 | SRGN3.3 | MNQKFILGLDIGITSVGYGLIDYETKNIIDAGVRLFPEANVENNEGRRSKRGSRRLKR |
| | | RRIHRLERVKLLLTEYDLINKEQIPTSNNPYQIRVKGLSEILSKDELAIALLHLAKRRG |
| | | IHNVDVAADKEETASDSLSTKDQINKNAKFLESRYVCELQKERLENEGHVRGVENR |
| | | FLTKDIVREAKKIIDTQMQYYPEIDETFKEKYISLVETRREYFEGPGQGSPFGWNGDL |
| | | KKWYEMLMGHCTYFPQELRSVKYAYSADLFNALNDLNNLIIQRDNSEKLEYHEKY |
| | | HIIENVFKQKKKPTLKQIAKEIGVNPEDIKGYRITKSGTPEFTSFKLFHDLKKVVKDH |
| | | AILDDIDLLNQIAEILTIYQDKDSIVAELGQLEYLMSEADKQSISELTGYTGTHSLSLK |
| | | CMNMIIDELWHSSMNQMEVFTYLNMRPKKYELKGYQRIPTDMIDDAILSPVVKRTF |
| | | IQSINVINKVIEKYGIPEDIIIELARENNSDDRKKFINNLQKKNEATRKRINEIIGQTGN |
| | | QNAKRIVEKIRLHDQQEGKCLYSLESIPLEDLLNNPNHYEVDHIIPRSVSFDNSYHNK |
| | | VLVKQSENSKKSNLTPYQYFNSGKSKLSYNQFKQHILNLSKSQDRISKKKKEYLLEE |
| | | RDINKFEVQKEFINRNLVDTRYATRELTSYLKAYFSANNMDVKVKTINGSFTNHLR |
| | | KVWRFDKYRNHGYKHHAEDALIIANADFLFKENKKLQNTNKILEKPTIENNTKKVT |
| | | VEKEEDYNNVFETPKLVEDIKQYRDYKFSHRVDKKPNRQLINDTLYSTRMKDEHDY |
| | | IVQTITDIYGKDNTNLKKQFNKNPEKFLMYQNDPKTFEKLSIIMKQYSDEKNPLAKY |
| | | YEETGEYLTKYSKKNNGPIVKKIKLLGNKVGNHLDVTNKYENSTKKLVKLSIKNYR |
| | | FDVYLTEKGYKFVTIAYLNVFKKDNYYYIPKDKYQELKEKKKIKDTDQFIASFYKN |
| | | DLIKLNGDLYKIIGVNSDDRNIIELDYYDIKYKDYCEINNIKGEPRIKKTIGKKTESIEK |
| | | FTTDVLGNLYLHSTEKAPQLIFKRGL |
| 3603 | SRGN3.3(N585A) | MNQKFILGLDIGITSVGYGLIDYETKNIIDAGVRLFPEANVENNEGRRSKRGSRRLKR |
| | Nickase | RRIHRLERVKLLLTEYDLINKEQIPTSNNPYQIRVKGLSEILSKDELAIALLHLAKRRG |
| | | IHNVDVAADKEETASDSLSTKDQINKNAKFLESRYVCELQKERLENEGHVRGVENR |
| | | FLTKDIVREAKKIIDTQMQYYPEIDETFKEKYISLVETRREYFEGPGQGSPFGWNGDL |
| | | KKWYEMLMGHCTYFPQELRSVKYAYSADLFNALNDLNNLIIQRDNSEKLEYHEKY |
| | | HIIENVFKQKKKPTLKQIAKEIGVNPEDIKGYRITKSGTPEFTSFKLFHDLKKVVKDH |
| | | AILDDIDLLNQIAEILTIYQDKDSIVAELGQLEYLMSEADKQSISELTGYTGTHSLSLK |
| | | CMNMIIDELWHSSMNQMEVFTYLNMRPKKYELKGYQRIPTDMIDDAILSPVVKRTF |
| | | IQSINVINKVIEKYGIPEDIIIELARENNSDDRKKFINNLQKKNEATRKRINEIIGQTGN |
| | | QNAKRIVEKIRLHDQQEGKCLYSLESIPLEDLLNNPNHYEVDHIIPRSVSFDNSYHNK |
| | | VLVKQSEASKKSNLTPYQYFNSGKSKLSYNQFKQHILNLSKSQDRISKKKKEYLLEE |
| | | RDINKFEVQKEFINRNLVDTRYATRELTSYLKAYFSANNMDVKVKTINGSFTNHLR |
| | | KVWRFDKYRNHGYKHHAEDALIIANADFLFKENKKLQNTNKILEKPTIENNTKKVT |
| | | VEKEEDYNNVFETPKLVEDIKQYRDYKFSHRVDKKPNRQLINDTLYSTRMKDEHDY |
| | | IVQTITDIYGKDNTNLKKQFNKNPEKFLMYQNDPKTFEKLSIIMKQYSDEKNPLAKY |
| | | YEETGEYLTKYSKKNNGPIVKKIKLLGNKVGNHLDVTNKYENSTKKLVKLSIKNYR |
| | | FDVYLTEKGYKFVTIAYLNVFKKDNYYYIPKDKYQELKEKKKIKDTDQFIASFYKN |
| | | DLIKLNGDLYKIIGVNSDDRNIIELDYYDIKYKDYCEINNIKGEPRIKKTIGKKTESIEK |
| | | FTTDVLGNLYLHSTEKAPQLIFKRGL |
| 3604 | Met(−) | NQKFILGLDIGITSVGYGLIDYETKNIIDAGVRLFPEANVENNEGRRSKRGSRRLKRR |
| | sRGN3.3(N584A)N | RIHRLERVKLLLTEYDLINKEQIPTSNNPYQIRVKGLSEILSKDELAIALLHLAKRRGI |
| | ickase | HNVDVAADKEETASDSLSTKDQINKNAKFLESRYVCELQKERLENEGHVRGVENRF |
| | | LTKDIVREAKKIIDTQMQYYPEIDETFKEKYISLVETRREYFEGPGQGSPFGWNGDLK |
| | | KWYEMLMGHCTYFPQELRSVKYAYSADLFNALNDLNNLIIQRDNSEKLEYHEKYHI |
| | | IENVFKQKKKPTLKQIAKEIGVNPEDIKGYRITKSGTPEFTSFKLFHDLKKVVKDHAI |
| | | LDDIDLLNQIAEILTIYQDKDSIVAELGQLEYLMSEADKQSISELTGYTGTHSLSLKC |
| | | MNMIIDELWHSSMNQMEVFTYLNMRPKKYELKGYQRIPTDMIDDAILSPVVKRTFI |
| | | QSINVINKVIEKYGIPEDIIIELARENNSDDRKKFINNLQKKNEATRKRINEIIGQTGNQ |
| | | NAKRIVEKIRLHDQQEGKCLYSLESIPLEDLLNNPNHYEVDHIIPRSVSFDNSYHNKV |
| | | LVKQSEASKKSNLTPYQYFNSGKSKLSYNQFKQHILNLSKSQDRISKKKKEYLLEER |
| | | DINKFEVQKEFINRNLVDTRYATRELTSYLKAYFSANNMDVKVKTINGSFTNHLRK |
| | | VWRFDKYRNHGYKHHAEDALIIANADFLFKENKKLQNTNKILEKPTIENNTKKVTV |
| | | EKEEDYNNVFETPKLVEDIKQYRDYKFSHRVDKKPNRQLINDTLYSTRMKDEHDYI |
| | | VQTITDIYGKDNTNLKKQFNKNPEKFLMYQNDPKTFEKLSIIMKQYSDEKNPLAKY |
| | | YEETGEYLTKYSKKNNGPIVKKIKLLGNKVGNHLDVTNKYENSTKKLVKLSIKNYR |
| | | FDVYLTEKGYKFVTIAYLNVFKKDNYYYIPKDKYQELKEKKKIKDTDQFIASFYKN |
| | | DLIKLNGDLYKIIGVNSDDRNIIELDYYDIKYKDYCEINNIKGEPRIKKTIGKKTESIEK |
| | | FTTDVLGNLYLHSTEKAPQLIFKRGL |
| 3605 | SpG | MDKKYSIGLDIGTNSVGWAVITDEYKVPSKKFKVLGNTDRHSIKKNLIGALLFDSGE |
| | | TAEATRLKRTARRRYTRRKNRICYLQEIFSNEMAKVDDSFFHRLEESFLVEEDKKHE |
| | | RHPIFGNIVDEVAYHEKYPTIYHLRKKLVDSTDKADLRLIYLALAHMIKFRGHFLIEG |
| | | DLNPDNSDVDKLFIQLVQTYNQLFEENPINASGVDAKAILSARLSKSRRLENLIAQLP |
| | | GEKKNGLFGNLIALSLGLTPNFKSNFDLAEDAKLQLSKDTYDDDLDNLLAQIGDQY |
| | | ADLFLAAKNLSDAILLSDILRVNTEITKAPLSASMIKRYDEHHQDLTLLKALVRQQLP |
| | | EKYKEIFFDQSKNGYAGYIDGGASQEEFYKFIKPILEKMDGTEELLVKLNREDLLRK |
| | | QRTFDNGSIPHQIHLGELHAILRRQEDFYPFLKDNREKIEKILTFRIPYYVGPLARGNS |
| | | RFAWMTRKSEETITPWNFEEVVDKGASAQSFIERMTNFDKNLPNEKVLPKHSLLYE |
| | | YFTVYNELTKVKYVTEGMRKPAFLSGEQKKAIVDLLFKTNRKVTVKQLKEDYFKKI |
| | | ECFDSVEISGVEDRFNASLGTYHDLLKIIKDKDFLDNEENEDILEDIVLTLTLFEDREM |
| | | IEERLKTYAHLFDDKVMKQLKRRRYTGWGRLSRKLINGIRDKQSGKTILDFLKSDGF |
| | | ANRNFMQLIHDDSLTFKEDIQKAQVSGQGDSLHEHIANLAGSPAIKKGILQTVKVVD |
| | | ELVKVMGRHKPENIVIEMARENQTTQKGQKNSRERMKRIEEGIKELGSQILKEHPVE |
| | | NTQLQNEKLYLYYLQNGRDMYVDQELDINRLSDYDVDHIVPQSFLKDDSIDNKVLT |
| | | RSDKNRGKSDNVPSEEVVKKMKNYWRQLLNAKLITQRKFDNLTKAERGGLSELDK |
| | | AGFIKRQLVETRQITKHVAQILDSRMNTKYDENDKLIREVKVITLKSKLVSDFRKDF |
| | | QFYKVREINNYHHAHDAYLNAVVGTALIKKYPKLESEFVYGDYKVYDVRKMIAKS |
| | | EQEIGKATAKYFFYSNIMNFFKTEITLANGEIRKRPLIETNGETGEIVWDKGRDFATV |
| | | RKVLSMPQVNIVKKTEVQTGGFSKESILPKRNSDKLIARKKDWDPKKYGGFLWPTV |
| | | AYSVLVVAKVEKGKSKKLKSVKELLGITIMERSSFEKNPIDFLEAKGYKEVKKDLIIK |
| | | LPKYSLFELENGRKRMLASAKQLQKGNELALPSKYVNFLYLASHYEKLKGSPEDNE |
| 3606 | SpG(H840A) | QKQLFVEQHKHYLDEIIEQISEFSKRVILADANLDKVLSAYNKHRDKPIREQAENIIH |
| | Nickase | LFTLTNLGAPAAFKYFDTTIDRKQYRSTKEVLDATLIHQSITGLYETRIDLSQLGGD |
| | | MDKKYSIGLDIGTNSVGWAVITDEYKVPSKKFKVLGNTDRHSIKKNLIGALLFDSGE |
| | | TAEATRLKRTARRRYTRRKNRICYLQEIFSNEMAKVDDSFFHRLEESFLVEEDKKHE |
| | | RHPIFGNIVDEVAYHEKYPTIYHLRKKLVDSTDKADLRLIYLALAHMIKFRGHFLIEG |
| | | DLNPDNSDVDKLFIQLVQTYNQLFEENPINASGVDAKAILSARLSKSRRLENLIAQLP |
| | | GEKKNGLFGNLIALSLGLTPNFKSNFDLAEDAKLQLSKDTYDDDLDNLLAQIGDQY |
| | | ADLFLAAKNLSDAILLSDILRVNTEITKAPLSASMIKRYDEHHQDLTLLKALVRQQLP |
| | | EKYKEIFFDQSKNGYAGYIDGGASQEEFYKFIKPILEKMDGTEELLVKLNREDLLRK |
| | | QRTFDNGSIPHQIHLGELHAILRRQEDFYPFLKDNREKIEKILTFRIPYYVGPLARGNS |
| | | RFAWMTRKSEETITPWNFEEVVDKGASAQSFIERMTNFDKNLPNEKVLPKHSLLYE |
| | | YFTVYNELTKVKYVTEGMRKPAFLSGEQKKAIVDLLFKTNRKVTVKQLKEDYFKKI |
| | | ECFDSVEISGVEDRFNASLGTYHDLLKIIKDKDFLDNEENEDILEDIVLTLTLFEDREM |
| | | IEERLKTYAHLFDDKVMKQLKRRRYTGWGRLSRKLINGIRDKQSGKTILDFLKSDGF |
| | | ANRNFMQLIHDDSLTFKEDIQKAQVSGQGDSLHEHIANLAGSPAIKKGILQTVKVVD |
| | | ELVKVMGRHKPENIVIEMARENQTTQKGQKNSRERMKRIEEGIKELGSQILKEHPVE |
| | | NTQLQNEKLYLYYLQNGRDMYVDQELDINRLSDYDVDAIVPQSFLKDDSIDNKVLT |
| | | RSDKNRGKSDNVPSEEVVKKMKNYWRQLLNAKLITQRKFDNLTKAERGGLSELDK |
| | | AGFIKRQLVETRQITKHVAQILDSRMNTKYDENDKLIREVKVITLKSKLVSDFRKDF |
| | | QFYKVREINNYHHAHDAYLNAVVGTALIKKYPKLESEFVYGDYKVYDVRKMIAKS |
| | | EQEIGKATAKYFFYSNIMNFFKTEITLANGEIRKRPLIETNGETGEIVWDKGRDFATV |
| 3607 | Met(−) | RKVLSMPQVNIVKKTEVQTGGFSKESILPKRNSDKLIARKKDWDPKKYGGFLWPTV |
| | SpG(H839A) | AYSVLVVAKVEKGKSKKLKSVKELLGITIMERSSFEKNPIDFLEAKGYKEVKKDLIIK |
| | Nickase | LPKYSLFELENGRKRMLASAKQLQKGNELALPSKYVNFLYLASHYEKLKGSPEDNE |
| | | QKQLFVEQHKHYLDEIIEQISEFSKRVILADANLDKVLSAYNKHRDKPIREQAENIIH |
| | | LFTLTNLGAPAAFKYFDTTIDRKQYRSTKEVLDATLIHQSITGLYETRIDLSQLGGD |
| | | DKKYSIGLDIGTNSVGWAVITDEYKVPSKKFKVLGNTDRHSIKKNLIGALLFDSGET |
| | | AEATRLKRTARRRYTRRKNRICYLQEIFSNEMAKVDDSFFHRLEESFLVEEDKKHER |
| | | HPIFGNIVDEVAYHEKYPTIYHLRKKLVDSTDKADLRLIYLALAHMIKFRGHFLIEGD |
| | | LNPDNSDVDKLFIQLVQTYNQLFEENPINASGVDAKAILSARLSKSRRLENLIAQLPG |
| | | EKKNGLFGNLIALSLGLTPNFKSNFDLAEDAKLQLSKDTYDDDLDNLLAQIGDQYA |
| | | DLFLAAKNLSDAILLSDILRVNTEITKAPLSASMIKRYDEHHQDLTLLKALVRQQLPE |
| | | KYKEIFFDQSKNGYAGYIDGGASQEEFYKFIKPILEKMDGTEELLVKLNREDLLRKQ |
| | | RTFDNGSIPHQIHLGELHAILRRQEDFYPFLKDNREKIEKILTFRIPYYVGPLARGNSR |
| | | FAWMTRKSEETITPWNFEEVVDKGASAQSFIERMTNFDKNLPNEKVLPKHSLLYEY |
| | | FTVYNELTKVKYVTEGMRKPAFLSGEQKKAIVDLLFKTNRKVTVKQLKEDYFKKIE |
| | | CFDSVEISGVEDRFNASLGTYHDLLKIIKDKDFLDNEENEDILEDIVLTLTLFEDREMI |
| | | EERLKTYAHLFDDKVMKQLKRRRYTGWGRLSRKLINGIRDKQSGKTILDFLKSDGF |
| | | ANRNFMQLIHDDSLTFKEDIQKAQVSGQGDSLHEHIANLAGSPAIKKGILQTVKVVD |
| | | ELVKVMGRHKPENIVIEMARENQTTQKGQKNSRERMKRIEEGIKELGSQILKEHPVE |
| | | NTQLQNEKLYLYYLQNGRDMYVDQELDINRLSDYDVDAIVPQSFLKDDSIDNKVLT |
| | | RSDKNRGKSDNVPSEEVVKKMKNYWRQLLNAKLITQRKFDNLTKAERGGLSELDK |
| | | AGFIKRQLVETRQITKHVAQILDSRMNTKYDENDKLIREVKVITLKSKLVSDFRKDF |
| | | QFYKVREINNYHHAHDAYLNAVVGTALIKKYPKLESEFVYGDYKVYDVRKMIAKS |
| | | EQEIGKATAKYFFYSNIMNFFKTEITLANGEIRKRPLIETNGETGEIVWDKGRDFATV |
| | | RKVLSMPQVNIVKKTEVQTGGFSKESILPKRNSDKLIARKKDWDPKKYGGFLWPTV |
| | | AYSVLVVAKVEKGKSKKLKSVKELLGITIMERSSFEKNPIDFLEAKGYKEVKKDLIIK |
| | | LPKYSLFELENGRKRMLASAKQLQKGNELALPSKYVNFLYLASHYEKLKGSPEDNE |
| | | QKQLFVEQHKHYLDEIIEQISEFSKRVILADANLDKVLSAYNKHRDKPIREQAENIIH |
| | | LFTLTNLGAPAAFKYFDTTIDRKQYRSTKEVLDATLIHQSITGLYETRIDLSQLGGD |
| | saCas9 PAM | NNGRRT |
| | saCas9 PAM | NNGRRN |
| | saCas9-KKH | NNNRRT |
| | (E782K, N968K, | |
| | R1015H) PAM | |
| | NmCas9 PAM | NNNNGATT |
| | StCas9 PAM | NNAGAAW |
| | TdCas9 PAM | NAAAAC |
| 3608 | NLS of SV40 Large | PKKKRKV |
| | T-AG | |
| 3609 | N-terminal NLS | MKRTADGSEFESPKKKRKV |
| | and Linker for | |
| | Exemplary Prime | |
| | Editor | |
| 3610 | NLS | MDSLLMNRRKFLYQFKNVRWAKGRRETYLC |
| 3611 | NLS of | AVKRPAATKKAGQAKKKKLD |
| | Nucleoplasmin | |
| 3612 | NLS of EGL-13 | MSRRRKANPTKLSENAKKLAKEVEN |
| 3613 | NLS of C-Myc | PAAKRVKLD |
| 3614 | NLS of Tus-protein | KLKIKRPVK |
| 3615 | NLS of polyoma | VSRKRPRP |
| | large T-AG | |
| 3616 | NLS of Hepatitis D | EGAPPAKRAR |
| | virus antigen | |
| 3617 | NLS of murine p53 | PPQPKKKPLDGE |
| 3618 | C-Terminal linker | SGGSKRTADGSEFEPKKKRKV |
| | and NLS for | |
| | Exemplary Prime | |
| | Editor | |
| 3619 | MS2 aptamer | GCCAACATGAGGATCACCCATGTCTGCAGGGCC |
| 3620 | MS2cp | GSASNFTQFVLVDNGGTGDVTVAPSNFANGVAEWISSNSRSQAYKVTCSVRQSSAQ |
| | | NRKYTIKVEVPKVATQTVGGEELPVAGWRSYLNMELTIPIFATNSDCELIVKAMQGL |
| | | LKDGNPIPSAIAANSGIY |
| 3621 | Exemplary Prime | MKRTADGSEFESPKKKRKVDKKYSIGLDIGTNSVGWAVITDEYKVPSKKFKVLGNT |
| | Editor [NLS]- | DRHSIKKNLIGALLFDSGETAEATRLKRTARRRYTRRKNRICYLQEIFSNEMAKVDD |
| | [Cas9(H840A)]- | SFFHRLEESFLVEEDKKHERHPIFGNIVDEVAYHEKYPTIYHLRKKLVDSTDKADLRL |
| | [linker]- | IYLALAHMIKFRGHFLIEGDLNPDNSDVDKLFIQLVQTYNQLFEENPINASGVDAKAI |
| | [MMLV_RT(D200N) | LSARLSKSRRLENLIAQLPGEKKNGLFGNLIALSLGLTPNFKSNFDLAEDAKLQLSKD |
| | (T330P)(L603W) | TYDDDLDNLLAQIGDQYADLFLAAKNLSDAILLSDILRVNTEITKAPLSASMIKRYDE |
| | (T306K)(W313F)]- | HHQDLTLLKALVRQQLPEKYKEIFFDQSKNGYAGYIDGGASQEEFYKFIKPILEKMD |
| | [NLS] | GTEELLVKLNREDLLRKQRTFDNGSIPHQIHLGELHAILRRQEDFYPFLKDNREKIEKI |
| | | LTFRIPYYVGPLARGNSRFAWMTRKSEETITPWNFEEVVDKGASAQSFIERMTNFDK |
| | | NLPNEKVLPKHSLLYEYFTVYNELTKVKYVTEGMRKPAFLSGEQKKAIVDLLFKTN |
| | | RKVTVKQLKEDYFKKIECFDSVEISGVEDRFNASLGTYHDLLKIIKDKDFLDNEENE |
| | | DILEDIVLTLTLFEDREMIEERLKTYAHLFDDKVMKQLKRRRYTGWGRLSRKLINGI |
| | | RDKQSGKTILDFLKSDGFANRNFMQLIHDDSLTFKEDIQKAQVSGQGDSLHEHIANL |
| | | AGSPAIKKGILQTVKVVDELVKVMGRHKPENIVIEMARENQTTQKGQKNSRERMKR |
| | | IEEGIKELGSQILKEHPVENTQLQNEKLYLYYLQNGRDMYVDQELDINRLSDYDVD |
| | | AIVPQSFLKDDSIDNKVLTRSDKNRGKSDNVPSEEVVKKMKNYWRQLLNAKLITQR |
| | | KFDNLTKAERGGLSELDKAGFIKRQLVETRQITKHVAQILDSRMNTKYDENDKLIRE |
| | | VKVITLKSKLVSDFRKDFQFYKVREINNYHHAHDAYLNAVVGTALIKKYPKLESEF |
| | | VYGDYKVYDVRKMIAKSEQEIGKATAKYFFYSNIMNFFKTEITLANGEIRKRPLIETN |
| | | GETGEIVWDKGRDFATVRKVLSMPQVNIVKKTEVQTGGFSKESILPKRNSDKLIARK |
| | | KDWDPKKYGGFDSPTVAYSVLVVAKVEKGKSKKLKSVKELLGITIMERSSFEKNPI |
| | | DFLEAKGYKEVKKDLIIKLPKYSLFELENGRKRMLASAGELQKGNELALPSKYVNFL |
| | | YLASHYEKLKGSPEDNEQKQLFVEQHKHYLDEIIEQISEFSKRVILADANLDKVLSA |
| | | YNKHRDKPIREQAENIIHLFTLTNLGAPAAFKYFDTTIDRKRYTSTKEVLDATLIHQSI |
| | | TGLYETRIDLSQLGGDSGGSSGGSSGSETPGTSESATPESSGGSSGGSSTLNIEDEYRL |
| | | HETSKEPDVSLGSTWLSDFPQAWAETGGMGLAVRQAPLIIPLKATSTPVSIKQYPMS |
| | | QEARLGIKPHIQRLLDQGILVPCQSPWNTPLLPVKKPGTNDYRPVQDLREVNKRVED |
| | | IHPTVPNPYNLLSGLPPSHQWYTVLDLKDAFFCLRLHPTSQPLFAFEWRDPEMGISG |
| | | QLTWTRLPQGFKNSPTLFNEALHRDLADFRIQHPDLILLQYVDDLLLAATSELDCQQ |
| | | GTRALLQTLGNLGYRASAKKAQICQKQVKYLGYLLKEGQRWLTEARKETVMGQPT |
| | | PKTPRQLREFLGKAGFCRLFIPGFAEMAAPLYPLTKPGTLFNWGPDQQKAYQEIKQA |
| | | LLTAPALGLPDLTKPFELFVDEKQGYAKGVLTQKLGPWRRPVAYLSKKLDPVAAG |
| | | WPPCLRMVAAIAVLTKDAGKLTMGQPLVILAPHAVEALVKQPPDRWLSNARMTHY |
| | | QALLLDTDRVQFGPVVALNPATLLPLPEEGLQHNCLDILAEAHGTRPDLTDQPLPDA |
| | | DHTWYTDGSSLLQEGQRKAGAAVTTETEVIWAKALPAGTSAQRAELIALTQALKM |
| | | AEGKKLNVYTDSRYAFATAHIHGEIYRRRGWLTSEGKEIKNKDEILALLKALFLPKR |
| | | LSIIHCPGHQKGHSAEARGNRMADQAARKAAITETPDTSTLLIENSSPSGGSKRTADG |
| | | SEFEPKKKRKV |
| 3622 | Pemax Prime | MKRTADGSEFESPKKKRKVDKKYSIGLDIGTNSVGWAVITDEYKVPSKKFKVLGNT |
| | Editor | DRHSIKKNLIGALLFDSGETAEATRLKRTARRRYTRRKNRICYLQEIFSNEMAKVDD |
| | | SFFHRLEESFLVEEDKKHERHPIFGNIVDEVAYHEKYPTIYHLRKKLVDSTDKADLRL |
| | | IYLALAHMIKFRGHFLIEGDLNPDNSDVDKLFIQLVQTYNQLFEENPINASGVDAKAI |
| | | LSARLSKSRKLENLIAQLPGEKKNGLFGNLIALSLGLTPNFKSNFDLAEDAKLQLSKD |
| | | TYDDDLDNLLAQIGDQYADLFLAAKNLSDAILLSDILRVNTEITKAPLSASMIKRYDE |
| | | HHQDLTLLKALVRQQLPEKYKEIFFDQSKNGYAGYIDGGASQEEFYKFIKPILEKMD |
| | | GTEELLVKLKREDLLRKQRTFDNGSIPHQIHLGELHAILRRQEDFYPFLKDNREKIEKI |
| | | LTFRIPYYVGPLARGNSRFAWMTRKSEETITPWNFEEVVDKGASAQSFIERMTNFDK |
| | | NLPNEKVLPKHSLLYEYFTVYNELTKVKYVTEGMRKPAFLSGEQKKAIVDLLFKTN |
| | | RKVTVKQLKEDYFKKIECFDSVEISGVEDRFNASLGTYHDLLKIIKDKDFLDNEENE |
| | | DILEDIVLTLTLFEDREMIEERLKTYAHLFDDKVMKQLKRRRYTGWGRLSRKLINGI |
| | | RDKQSGKTILDFLKSDGFANRNFMQLIHDDSLTFKEDIQKAQVSGQGDSLHEHIANL |
| | | AGSPAIKKGILQTVKVVDELVKVMGRHKPENIVIEMARENQTTQKGQKNSRERMKR |
| | | IEEGIKELGSQILKEHPVENTQLQNEKLYLYYLQNGRDMYVDQELDINRLSDYDVD |
| | | AIVPQSFLKDDSIDNKVLTRSDKNRGKSDNVPSEEVVKKMKNYWRQLLNAKLITQR |
| | | KFDNLTKAERGGLSELDKAGFIKRQLVETRQITKHVAQILDSRMNTKYDENDKLIRE |
| | | VKVITLKSKLVSDFRKDFQFYKVREINNYHHAHDAYLNAVVGTALIKKYPKLESEF |
| | | VYGDYKVYDVRKMIAKSEQEIGKATAKYFFYSNIMNFFKTEITLANGEIRKRPLIETN |
| | | GETGEIVWDKGRDFATVRKVLSMPQVNIVKKTEVQTGGFSKESILPKRNSDKLIARK |
| | | KDWDPKKYGGFDSPTVAYSVLVVAKVEKGKSKKLKSVKELLGITIMERSSFEKNPI |
| | | DFLEAKGYKEVKKDLIIKLPKYSLFELENGRKRMLASAGELQKGNELALPSKYVNFL |
| | | YLASHYEKLKGSPEDNEQKQLFVEQHKHYLDEIIEQISEFSKRVILADANLDKVLSA |
| | | YNKHRDKPIREQAENIIHLFTLTNLGAPAAFKYFDTTIDRKRYTSTKEVLDATLIHQSI |
| | | TGLYETRIDLSQLGGDSGGSSGGSKRTADGSEFESPKKKRKVSGGSSGGSTLNIEDEY |
| | | RLHETSKEPDVSLGSTWLSDFPQAWAETGGMGLAVRQAPLIIPLKATSTPVSIKQYP |
| | | MSQEARLGIKPHIQRLLDQGILVPCQSPWNTPLLPVKKPGTNDYRPVQDLREVNKRV |
| | | EDIHPTVPNPYNLLSGLPPSHQWYTVLDLKDAFFCLRLHPTSQPLFAFEWRDPEMGIS |
| | | GQLTWTRLPQGFKNSPTLFNEALHRDLADFRIQHPDLILLQYVDDLLLAATSELDCQ |
| | | QGTRALLQTLGNLGYRASAKKAQICQKQVKYLGYLLKEGQRWLTEARKETVMGQ |
| | | PTPKTPRQLREFLGKAGFCRLFIPGFAEMAAPLYPLTKPGTLFNWGPDQQKAYQEIK |
| | | QALLTAPALGLPDLTKPFELFVDEKQGYAKGVLTQKLGPWRRPVAYLSKKLDPVA |
| | | AGWPPCLRMVAAIAVLTKDAGKLTMGQPLVILAPHAVEALVKQPPDRWLSNARMT |
| | | HYQALLLDTDRVQFGPVVALNPATLLPLPEEGLQHNCLDILAEAHGTRPDLTDQPLP |
| | | DADHTWYTDGSSLLQEGQRKAGAAVTTETEVIWAKALPAGTSAQRAELIALTQAL |
| | | KMAEGKKLNVYTDSRYAFATAHIHGEIYRRRGWLTSEGKEIKNKDEILALLKALFLP |
| | | KRLSIIHCPGHQKGHSAEARGNRMADQAARKAAITETPDTSTLLIENSSPSGGSKRTA |
| | | DGSEFESPKKKRKVGSGPAAKRVKLD |
| | PEmax-N- | MKRTADGSEFESPKKKRKV |
| | terminal | |
| | bpSV40NLS | |
| 3623 | PEmax-CAS9 | DKKYSIGLDIGTNSVGWAVITDEYKVPSKKFKVLGNTDRHSIKKNLIGALLFDSGET |
| | (R221K N394K | AEATRLKRTARRRYTRRKNRICYLQEIFSNEMAKVDDSFFHRLEESFLVEEDKKHER |
| | H840A) (not | HPIFGNIVDEVAYHEKYPTIYHLRKKLVDSTDKADLRLIYLALAHMIKFRGHFLIEGD |
| | including N- | LNPDNSDVDKLFIQLVQTYNQLFEENPINASGVDAKAILSARLSKSRKLENLIAQLPG |
| | terminal Met in | EKKNGLFGNLIALSLGLTPNFKSNFDLAEDAKLQLSKDTYDDDLDNLLAQIGDQYA |
| | Cas9) | DLFLAAKNLSDAILLSDILRVNTEITKAPLSASMIKRYDEHHQDLTLLKALVRQQLPE |
| | | KYKEIFFDQSKNGYAGYIDGGASQEEFYKFIKPILEKMDGTEELLVKLKREDLLRKQ |
| | | RTFDNGSIPHQIHLGELHAILRRQEDFYPFLKDNREKIEKILTFRIPYYVGPLARGNSR |
| | | FAWMTRKSEETITPWNFEEVVDKGASAQSFIERMTNFDKNLPNEKVLPKHSLLYEY |
| | | FTVYNELTKVKYVTEGMRKPAFLSGEQKKAIVDLLFKTNRKVTVKQLKEDYFKKIE |
| | | CFDSVEISGVEDRFNASLGTYHDLLKIIKDKDFLDNEENEDILEDIVLTLTLFEDREMI |
| | | EERLKTYAHLFDDKVMKQLKRRRYTGWGRLSRKLINGIRDKQSGKTILDFLKSDGF |
| | | ANRNFMQLIHDDSLTFKEDIQKAQVSGQGDSLHEHIANLAGSPAIKKGILQTVKVVD |
| | | ELVKVMGRHKPENIVIEMARENQTTQKGQKNSRERMKRIEEGIKELGSQILKEHPVE |
| | | NTQLQNEKLYLYYLQNGRDMYVDQELDINRLSDYDVDAIVPQSFLKDDSIDNKVLT |
| | | RSDKNRGKSDNVPSEEVVKKMKNYWRQLLNAKLITQRKFDNLTKAERGGLSELDK |
| | | AGFIKRQLVETRQITKHVAQILDSRMNTKYDENDKLIREVKVITLKSKLVSDFRKDF |
| | | QFYKVREINNYHHAHDAYLNAVVGTALIKKYPKLESEFVYGDYKVYDVRKMIAKS |
| | | EQEIGKATAKYFFYSNIMNFFKTEITLANGEIRKRPLIETNGETGEIVWDKGRDFATV |
| | | RKVLSMPQVNIVKKTEVQTGGFSKESILPKRNSDKLIARKKDWDPKKYGGFDSPTV |
| | | AYSVLVVAKVEKGKSKKLKSVKELLGITIMERSSFEKNPIDFLEAKGYKEVKKDLIIK |
| | | LPKYSLFELENGRKRMLASAGELQKGNELALPSKYVNFLYLASHYEKLKGSPEDNE |
| | | QKQLFVEQHKHYLDEIIEQISEFSKRVILADANLDKVLSAYNKHRDKPIREQAENIIH |
| | | LFTLTNLGAPAAFKYFDTTIDRKRYTSTKEVLDATLIHQSITGLYETRIDLSQLGGD |
| 3624 | PEmax-SGGSx2- | SGGSSGGSKRTADGSEFESPKKKRKVSGGSSGGS |
| | bpSV40NLS- | |
| | SGGSx2 linker | |
| | PEmax- | TLNIEDEYRLHETSKEPDVSLGSTWLSDFPQAWAETGGMGLAVRQAPLIIPLKATST |
| | MMLV RT D200N | PVSIKQYPMSQEARLGIKPHIQRLLDQGILVPCQSPWNTPLLPVKKPGTNDYRPVQD |
| | T330P L603W | LREVNKRVEDIHPTVPNPYNLLSGLPPSHQWYTVLDLKDAFFCLRLHPTSQPLFAFE |
| | T306K W313F | WRDPEMGISGQLTWTRLPQGFKNSPTLFNEALHRDLADFRIQHPDLILLQYVDDLLL |
| | | AATSELDCQQGTRALLQTLGNLGYRASAKKAQICQKQVKYLGYLLKEGQRWLTEA |
| | | RKETVMGQPTPKTPRQLREFLGKAGFCRLFIPGFAEMAAPLYPLTKPGTLFNWGPDQ |
| | | QKAYQEIKQALLTAPALGLPDLTKPFELFVDEKQGYAKGVLTQKLGPWRRPVAYLS |
| | | KKLDPVAAGWPPCLRMVAAIAVLTKDAGKLTMGQPLVILAPHAVEALVKQPPDRW |
| | | LSNARMTHYQALLLDTDRVQFGPVVALNPATLLPLPEEGLQHNCLDILAEAHGTRP |
| | | DLTDQPLPDADHTWYTDGSSLLQEGQRKAGAAVTTETEVIWAKALPAGTSAQRAE |
| | | LIALTQALKMAEGKKLNVYTDSRYAFATAHIHGEIYRRRGWLTSEGKEIKNKDEILA |
| | | LLKALFLPKRLSIIHCPGHQKGHSAEARGNRMADQAARKAAITETPDTSTLLIENSSP |
| 3625 | PEmax-C-terminal | SGGSKRTADGSEFESPKKKRKV |
| | linker-NLS | |
| 3626 | PEmax-C-terminal | GSGPAAKRVKLD |
| | linker-NLS2 | |
| 3627 | Linker | (GGGGS)n |
| 3628 | Linker | (G)n |
| 3629 | Linker | (EAAAK)n |
| 3630 | Linker | (GGS)n |
| 3631 | Linker | (SGGS)n |
| 3632 | Linker | (XP)n |
| 3633 | Linker | SGSETPGTSESATPES |
| 3634 | Linker | SGGSSGGSSGSETPGTSESATPESSGGSSGGS |
| 3635 | Linker between | SGGSSGGSSGSETPGTSESATPESSGGSSGGSS |
| | Cas9 domain and | |
| | RT domain in | |
| | Exemplary Prime | |
| | Editor | |
| 3636 | Linker | SGGSGGSGGS |
| 3637 | Linker | SGGS |
| 3638 | Linker | SGGSSGGSSGSETPGTSESATPESAGSYPYDVPDYAGSAAPAAKKKKLDGSGSGGSS |
| | | GGS |
| 3639 | Linker | GGSGGS |
| 3640 | Linker | GGSGGSGGS |
| 3641 | gRNA core | GTTTTAGAGCTAGAAATAGCAAGTTAAAATAAGGCTAGTCCGTTATCAACTTGA |
| | | AAAAGTGGCACCGAGTCGGTGC |
| 3642 | gRNA core | GTTTGAGAGCTAGAAATAGCAAGTTTAAATAAGGCTAGTCCGTTATCAACTTGA |
| | | AAAAGTGGGACCGAGTCGGTCC |
| 3643 | gRNA core | GTTTAAGAGCTATGCTGGAAACAGCATAGCAAGTTTAAATAAGGCTAGTCCGTT |
| | | ATCAACTTGAAAAAGTGGCACCGAGTCGGTGC |
| 3644 | SaCas9 gRNA core | GTTTTAGTACTCTGGAAACAGAATCTACTAAAACAAGGCAAAATGCCGTGTTTA |
| | | TCTCGTCAACTTGTTGGCGAGA |
| 3645 | SluCas9 gRNA | GTTTTAGTACTCTGGAAACAGAATCTACTGAAACAAGACAATATGTCGTGTTTAT |
| | core | CCCATCAATTTATTGGTGGGA |

LENGTHY TABLES
The patent application contains a lengthy table section. A copy of the table is available in electronic form from the USPTO web site (https://seqdata.uspto.gov/?pageRequest=docDetail&DocID=US20240360476A1). An electronic copy of the table will also be available from the USPTO upon request and payment of the fee set forth in 37 CFR 1.19(b)(3).

The application's sequence listing, which the Patent Office published only in electronic form, follows.

SEQUENCE LISTING (3797 sequences)

SEQ ID NO: 1 - RNA, 20 nt, synthetic construct
  source 1..20: mol_type = other RNA
gccggcgaacggggctcgaa

SEQ ID NO: 2 - RNA, 17 nt, synthetic construct
  source 1..17: mol_type = other RNA
gagccccgttcgccggc

SEQ ID NO: 3 - RNA, 16 nt, synthetic construct
  source 1..16: mol_type = other RNA
gagccccgttcgccgg

SEQ ID NO: 4 - RNA, 15 nt, synthetic construct
  source 1..15: mol_type = other RNA
gagccccgttcgccg

SEQ ID NO: 5 - RNA, 14 nt, synthetic construct
  source 1..14: mol_type = other RNA
gagccccgttcgcc

SEQ ID NO: 6 - RNA, 13 nt, synthetic construct
  source 1..13: mol_type = other RNA
gagccccgttcgc

SEQ ID NO: 7 - RNA, 12 nt, synthetic construct
  source 1..12: mol_type = other RNA
gagccccgttcg

SEQ ID NO: 8 - RNA, 11 nt, synthetic construct
  source 1..11: mol_type = other RNA
gagccccgttc

SEQ ID NO: 9 - RNA, 10 nt, synthetic construct
  source 1..10: mol_type = other RNA
gagccccgtt

SEQ ID NO: 10-16 - skipped (7 entries)

SEQ ID NO: 17 - RNA, 142 nt, synthetic construct
  source 1..142: mol_type = other RNA
gccggcgaacggggctcgaagttttagagctagaaatagcaagttaaaataaggctagtccgttatcaacttgaaaaagtggcaccgagtcggtgcggcttgtcgacgacggcggtctccgtcgtcaggatcatgagccccg

SEQ ID NO: 18 - RNA, 145 nt, synthetic construct
  source 1..145: mol_type = other RNA
gccggcgaacggggctcgaagttttagagctagaaatagcaagttaaaataaggctagtccgttatcaacttgaaaaagtggcaccgagtcggtgcggcttgtcgacgacggcggtctccgtcgtcaggatcatgagccccgttc

SEQ ID NO: 19 - RNA, 147 nt, synthetic construct
  source 1..147: mol_type = other RNA
gccggcgaacggggctcgaagttttagagctagaaatagcaagttaaaataaggctagtccgttatcaacttgaaaaagtggcaccgagtcggtgcggcttgtcgacgacggcggtctccgtcgtcaggatcatgagccccgttcgc

SEQ ID NO: 20 - RNA, 20 nt, synthetic construct
  source 1..20: mol_type = other RNA
ctcgaagggtccttgtagcc

SEQ ID NO: 21 - RNA, 17 nt, synthetic construct
  source 1..17: mol_type = other RNA
tacaaggacccttcgag

SEQ ID NO: 22 - RNA, 16 nt, synthetic construct
  source 1..16: mol_type = other RNA
tacaaggacccttcga

SEQ ID NO: 23 - RNA, 15 nt, synthetic construct
  source 1..15: mol_type = other RNA
tacaaggacccttcg

SEQ ID NO: 24 - RNA, 14 nt, synthetic construct
  source 1..14: mol_type = other RNA
tacaaggacccttc

SEQ ID NO: 25 - RNA, 13 nt, synthetic construct
  source 1..13: mol_type = other RNA
tacaaggaccctt

SEQ ID NO: 26 - RNA, 12 nt, synthetic construct
  source 1..12: mol_type = other RNA
tacaaggaccct

SEQ ID NO: 27 - RNA, 11 nt, synthetic construct
  source 1..11: mol_type = other RNA
tacaaggaccc

SEQ ID NO: 28 - RNA, 10 nt, synthetic construct
  source 1..10: mol_type = other RNA
tacaaggacc

SEQ ID NO: 29-35 - skipped (7 entries)

SEQ ID NO: 36 - RNA, 142 nt, synthetic construct
  source 1..142: mol_type = other RNA
ctcgaagggtccttgtagccgttttagagctagaaatagcaagttaaaataaggctagtccgttatcaacttgaaaaagtggcaccgagtcggtgcggcttgtcgacgacggcggtctccgtcgtcaggatcattacaagga

SEQ ID NO: 37 - RNA, 144 nt, synthetic construct
  source 1..144: mol_type = other RNA
ctcgaagggtccttgtagccgttttagagctagaaatagcaagttaaaataaggctagtccgttatcaacttgaaaaagtggcaccgagtcggtgcggcttgtcgacgacggcggtctccgtcgtcaggatcattacaaggacc

SEQ ID NO: 38 - RNA, 146 nt, synthetic construct
  source 1..146: mol_type = other RNA
ctcgaagggtccttgtagccgttttagagctagaaatagcaagttaaaataaggctagtccgttatcaacttgaaaaagtggcaccgagtcggtgcggcttgtcgacgacggcggtctccgtcgtcaggatcattacaaggaccct

SEQ ID NO: 39 - RNA, 20 nt, synthetic construct
  source 1..20: mol_type = other RNA
cggccggggagggaggggcc

SEQ ID NO: 40 - RNA, 17 nt, synthetic construct
  source 1..17: mol_type = other RNA
ccctccctccccggccg

SEQ ID NO: 41 - RNA, 16 nt, synthetic construct
  source 1..16: mol_type = other RNA
ccctccctccccggcc

SEQ ID NO: 42 - RNA, 15 nt, synthetic construct
  source 1..15: mol_type = other RNA
ccctccctccccggc

SEQ ID NO: 43 - RNA, 14 nt, synthetic construct
  source 1..14: mol_type = other RNA
ccctccctccccgg

SEQ ID NO: 44 - RNA, 13 nt, synthetic construct
  source 1..13: mol_type = other RNA
ccctccctccccg

SEQ ID NO: 45 - RNA, 12 nt, synthetic construct
  source 1..12: mol_type = other RNA
ccctccctcccc

SEQ ID NO: 46 - RNA, 11 nt, synthetic construct
  source 1..11: mol_type = other RNA
ccctccctccc

SEQ ID NO: 47 - RNA, 10 nt, synthetic construct
  source 1..10: mol_type = other RNA
ccctccctcc

SEQ ID NO: 48-54 - skipped (7 entries)

SEQ ID NO: 55 - RNA, 142 nt, synthetic construct
  source 1..142: mol_type = other RNA
cggccggggagggaggggccgttttagagctagaaatagcaagttaaaataaggctagtccgttatcaacttgaaaaagtggcaccgagtcggtgcggcttgtcgacgacggcggtctccgtcgtcaggatcatccctccct

SEQ ID NO: 56 - RNA, 144 nt, synthetic construct
  source 1..144: mol_type = other RNA
cggccggggagggaggggccgttttagagctagaaatagcaagttaaaataaggctagtccgttatcaacttgaaaaagtggcaccgagtcggtgcggcttgtcgacgacggcggtctccgtcgtcaggatcatccctccctcc

SEQ ID NO: 57 - RNA, 146 nt, synthetic construct
  source 1..146: mol_type = other RNA
cggccggggagggaggggccgttttagagctagaaatagcaagttaaaataaggctagtccgttatcaacttgaaaaagtggcaccgagtcggtgcggcttgtcgacgacggcggtctccgtcgtcaggatcatccctccctcccc

SEQ ID NO: 58 - RNA, 20 nt, synthetic construct
  source 1..20: mol_type = other RNA
gatccgggcccgccccctag

SEQ ID NO: 59 - RNA, 17 nt, synthetic construct
  source 1..17: mol_type = other RNA
gggggcgggcccggatc

SEQ ID NO: 60 - RNA, 16 nt, synthetic construct
  source 1..16: mol_type = other RNA
gggggcgggcccggat

SEQ ID NO: 61 - RNA, 15 nt, synthetic construct
  source 1..15: mol_type = other RNA
gggggcgggcccgga

SEQ ID NO: 62 - RNA, 14 nt, synthetic construct
  source 1..14: mol_type = other RNA
gggggcgggcccgg

SEQ ID NO: 63 - RNA, 13 nt, synthetic construct
  source 1..13: mol_type = other RNA
gggggcgggcccg

SEQ ID NO: 64 - RNA, 12 nt, synthetic construct
  source 1..12: mol_type = other RNA
gggggcgggccc

SEQ ID NO: 65 - RNA, 11 nt, synthetic construct
  source 1..11: mol_type = other RNA
gggggcgggcc

SEQ ID NO: 66 - RNA, 10 nt, synthetic construct
  source 1..10: mol_type = other RNA
gggggcgggc

SEQ ID NO: 67-73 - skipped (7 entries)

SEQ ID NO: 74 - RNA, 142 nt, synthetic construct
  source 1..142: mol_type = other RNA
gatccgggcccgccccctaggttttagagctagaaatagcaagttaaaataaggctagtccgttatcaacttgaaaaagtggcaccgagtcggtgcggcttgtcgacgacggcggtctccgtcgtcaggatcatgggggcgg

SEQ ID NO: 75 - RNA, 144 nt, synthetic construct
  source 1..144: mol_type = other RNA
gatccgggcccgccccctaggttttagagctagaaatagcaagttaaaataaggctagtccgttatcaacttgaaaaagtggcaccgagtcggtgcggcttgtcgacgacggcggtctccgtcgtcaggatcatgggggcgggc

SEQ ID NO: 76 - RNA, 146 nt, synthetic construct
  source 1..146: mol_type = other RNA
gatccgggcccgccccctaggttttagagctagaaatagcaagttaaaataaggctagtccgttatcaacttgaaaaagtggcaccgagtcggtgcggcttgtcgacgacggcggtctccgtcgtcaggatcatgggggcgggccc

SEQ ID NO: 77 - RNA, 20 nt, synthetic construct
  source 1..20: mol_type = other RNA
gttggaagactgagtgcccg

SEQ ID NO: 78 - RNA, 17 nt, synthetic construct
  source 1..17: mol_type = other RNA
gcactcagtcttccaac

SEQ ID NO: 79 - RNA, 16 nt, synthetic construct
  source 1..16: mol_type = other RNA
gcactcagtcttccaa

SEQ ID NO: 80 - RNA, 15 nt, synthetic construct
  source 1..15: mol_type = other RNA
gcactcagtcttcca

SEQ ID NO: 81 - RNA, 14 nt, synthetic construct
  source 1..14: mol_type = other RNA
gcactcagtcttcc

SEQ ID NO: 82 - RNA, 13 nt, synthetic construct
  source 1..13: mol_type = other RNA
gcactcagtcttc

SEQ ID NO: 83 - RNA, 12 nt, synthetic construct
  source 1..12: mol_type = other RNA
gcactcagtctt

SEQ ID NO: 84 - RNA, 11 nt, synthetic construct
  source 1..11: mol_type = other RNA
gcactcagtct

SEQ ID NO: 85 - RNA, 10 nt, synthetic construct
  source 1..10: mol_type = other RNA
gcactcagtc

SEQ ID NO: 86-92 - skipped (7 entries)

SEQ ID NO: 93 - RNA, 142 nt, synthetic construct
  source 1..142: mol_type = other RNA
gttggaagactgagtgcccggttttagagctagaaatagcaagttaaaataaggctagtccgttatcaacttgaaaaagtggcaccgagtcggtgcggcttgtcgacgacggcggtctccgtcgtcaggatcatgcactcag

SEQ ID NO: 94 - RNA, 144 nt, synthetic construct
  source 1..144: mol_type = other RNA
gttggaagactgagtgcccggttttagagctagaaatagcaagttaaaataaggctagtccgttatcaacttgaaaaagtggcaccgagtcggtgcggcttgtcgacgacggcggtctccgtcgtcaggatcatgcactcagtc

SEQ ID NO: 95 - RNA, 147 nt, synthetic construct
  source 1..147: mol_type = other RNA
gttggaagactgagtgcccggttttagagctagaaatagcaagttaaaataaggctagtccgttatcaacttgaaaaagtggcaccgagtcggtgcggcttgtcgacgacggcggtctccgtcgtcaggatcatgcactcagtcttc

SEQ ID NO: 96 - RNA, 143 nt, synthetic construct
  source 1..143: mol_type = other RNA
gttggaagactgagtgcccggttttagagctagaaatagcaagttaaaataaggctagtccgttatcaacttgaaaaagtggcaccgagtcggtgcggcttgtcgacgacggcggtctccgtcgtcaggatcatgcactcagt

SEQ ID NO: 97 - RNA, 144 nt, synthetic construct; identical to SEQ ID NO: 94
  source 1..144: mol_type = other RNA

SEQ ID NO: 98 - RNA, 146 nt, synthetic construct
  source 1..146: mol_type = other RNA
gttggaagactgagtgcccggttttagagctagaaatagcaagttaaaataaggctagtccgttatcaacttgaaaaagtggcaccgagtcggtgcggcttgtcgacgacggcggtctccgtcgtcaggatcatgcactcagtctt

SEQ ID NO: 99 - RNA, 148 nt, synthetic construct
  source 1..148: mol_type = other RNA
gttggaagactgagtgcccggttttagagctagaaatagcaagttaaaataaggctagtccgttatcaacttgaaaaagtggcaccgagtcggtgcggcttgtcgacgacggcggtctccgtcgtcaggatcatgcactcagtcttcc

SEQ ID NO: 100 - RNA, 149 nt, synthetic construct
  source 1..149: mol_type = other RNA
gttggaagactgagtgcccggttttagagctagaaatagcaagttaaaataaggctagtccgttatcaacttgaaaaagtggcaccgagtcggtgcggcttgtcgacgacggcggtctccgtcgtcaggatcatgcactcagtcttcca

SEQ ID NO: 101 - RNA, 150 nt, synthetic construct
  source 1..150: mol_type = other RNA
gttggaagactgagtgcccggttttagagctagaaatagcaagttaaaataaggctagtccgttatcaacttgaaaaagtggcaccgagtcggtgcggcttgtcgacgacggcggtctccgtcgtcaggatcatgcactcagtcttccaa

SEQ ID NO: 102 - RNA, 151 nt, synthetic construct
  source 1..151: mol_type = other RNA
gttggaagactgagtgcccggttttagagctagaaatagcaagttaaaataaggctagtccgttatcaacttgaaaaagtggcaccgagtcggtgcggcttgtcgacgacggcggtctccgtcgtcaggatcatgcactcagtcttccaac

SEQ ID NO: 103 - RNA, 146 nt, synthetic construct
  source 1..146: mol_type = other RNA
gttggaagactgagtgcccggttttagagctagaaatagcaagttaaaataaggctagtccgttatcaacttgaaaaagtggcaccgagtcggtgctttccaagatttgcaaccggcaactgtatgctattaccgcactcagtctt

SEQ ID NO: 104 - RNA, 146 nt, synthetic construct
  source 1..146: mol_type = other RNA
gttggaagactgagtgcccggttttagagctagaaatagcaagttaaaataaggctagtccgttatcaacttgaaaaagtggcaccgagtcggtgctattgttccggtttatcacgaagcgtactcggattacagcactcagtctt

SEQ ID NO: 105 - RNA, 146 nt, synthetic construct
  source 1..146: mol_type = other RNA
gttggaagactgagtgcccggttttagagctagaaatagcaagttaaaataaggctagtccgttatcaacttgaaaaagtggcaccgagtcggtgctatcgcaccaccctatgcgttccatatcaatacttatcgcactcagtctt

SEQ ID NO: 106 - RNA, 146 nt, synthetic construct
  source 1..146: mol_type = other RNA
gttggaagactgagtgcccggttttagagctagaaatagcaagttaaaataaggctagtccgttatcaacttgaaaaagtggcaccgagtcggtgcttcgtctacagtatccttctttcaacctattcaccgcagcactcagtctt

SEQ ID NO: 107 - RNA, 146 nt, synthetic construct
  source 1..146: mol_type = other RNA
gttggaagactgagtgcccggttttagagctagaaatagcaagttaaaataaggctagtccgttatcaacttgaaaaagtggcaccgagtcggtgctgttatggtgtgaatacttcatggcggatgatttccacgcactcagtctt

SEQ ID NO: 108 - RNA, 146 nt, synthetic construct
  source 1..146: mol_type = other RNA
gttggaagactgagtgcccggttttagagctagaaatagcaagttaaaataaggctagtccgttatcaacttgaaaaagtggcaccgagtcggtgctatgtatacgaagcccatgcaaacatattgccgatccagcactcagtctt

SEQ ID NO: 109 - RNA, 146 nt, synthetic construct
  source 1..146: mol_type = other RNA
gttggaagactgagtgcccggttttagagctagaaatagcaagttaaaataaggctagtccgttatcaacttgaaaaagtggcaccgagtcggtgcttaccgtgtctacatggtatttggcatttgcgattaccgcactcagtctt

SEQ ID NO: 110 - RNA, 146 nt, synthetic construct
  source 1..146: mol_type = other RNA
gttggaagactgagtgcccggttttagagctagaaatagcaagttaaaataaggctagtccgttatcaacttgaaaaagtggcaccgagtcggtgctatacaaggtacatataccaacgggcactccaacagaagcactcagtctt

SEQ ID NO: 111 - RNA, 146 nt, synthetic construct
  source 1..146: mol_type = other RNA
gttggaagactgagtgcccggttttagagctagaaatagcaagttaaaataaggctagtccgttatcaacttgaaaaagtggcaccgagtcggtgcttactgcgtatacttggaaatttacacgtccagagggagcactcagtctt

SEQ ID NO: 112 - RNA, 146 nt, synthetic construct
  source 1..146: mol_type = other RNA
gttggaagactgagtgcccggttttagagctagaaatagcaagttaaaataaggctagtccgttatcaacttgaaaaagtggcaccgagtcggtgctgtatgtacagggtatacggtcaggatatggcaccgccgcactcagtctt

SEQ ID NO: 113 - RNA, 146 nt, synthetic construct
  source 1..146: mol_type = other RNA
gttggaagactgagtgcccggttttagagctagaaatagcaagttaaaataaggctagtccgttatcaacttgaaaaagtggcaccgagtcggtgctcaccctcgacaagtacaggtactcgaatgcacggacagcactcagtctt

SEQ ID NO: 114 - RNA, 146 nt, synthetic construct
  source 1..146: mol_type = other RNA
gttggaagactgagtgcccggttttagagctagaaatagcaagttaaaataaggctagtccgttatcaacttgaaaaagtggcaccgagtcggtgcttccgaaagctttcgctctctcaggcgtattctggagcgcactcagtctt

SEQ ID NO: 115 - RNA, 146 nt, synthetic construct
  source 1..146: mol_type = other RNA
gttggaagactgagtgcccggttttagagctagaaatagcaagttaaaataaggctagtccgttatcaacttgaaaaagtggcaccgagtcggtgctggcggagaaatcaattgctctcaacccgtgttgctccgcactcagtctt

SEQ ID NO: 116 - RNA, 146 nt, synthetic construct
  source 1..146: mol_type = other RNA
gttggaagactgagtgcccggttttagagctagaaatagcaagttaaaataaggctagtccgttatcaacttgaaaaagtggcaccgagtcggtgctcacgttcctcatcttgttaccacgtgcaggcccatacgcactcagtctt

SEQ ID NO: 117 - RNA, 146 nt, synthetic construct
  source 1..146: mol_type = other RNA
gttggaagactgagtgcccggttttagagctagaaatagcaagttaaaataaggctagtccgttatcaacttgaaaaagtggcaccgagtcggtgctctcgtcaagggaaccaaacacgagtatgtgtgggctcgcactcagtctt

SEQ ID NO: 118 - RNA, 146 nt, synthetic construct
  source 1..146: mol_type = other RNA
gttggaagactgagtgcccggttttagagctagaaatagcaagttaaaataaggctagtccgttatcaacttgaaaaagtggcaccgagtcggtgctatactgtgcgccgacatacgagggtttcctgtcactcgcactcagtctt

SEQ ID NO: 119 - RNA, 146 nt, synthetic construct
  source 1..146: mol_type = other RNA
gttggaagactgagtgcccggttttagagctagaaatagcaagttaaaataaggctagtccgttatcaacttgaaaaagtggcaccgagtcggtgctctctggaatctttcgtttctcacgggtgtggtgtggcgcactcagtctt

SEQ ID NO: 120 - RNA, 146 nt, synthetic construct
  source 1..146: mol_type = other RNA
gttggaagactgagtgcccggttttagagctagaaatagcaagttaaaataaggctagtccgttatcaacttgaaaaagtggcaccgagtcggtgctacctatgtacaccagaaccagtcctcgtgtgctccacgcactcagtctt

SEQ ID NO: 121 - RNA, 146 nt, synthetic construct
  source 1..146: mol_type = other RNA
gttggaagactgagtgcccggttttagagctagaaatagcaagttaaaataaggctagtccgttatcaacttgaaaaagtggcaccgagtcggtgctaccggagggcgacactcgaggttgtgacctcccacacgcactcagtctt

SEQ ID NO: 122 - RNA, 146 nt, synthetic construct
  source 1..146: mol_type = other RNA
gttggaagactgagtgcccggttttagagctagaaatagcaagttaaaataaggctagtccgttatcaacttgaaaaagtggcaccgagtcggtgctcgtccctgtccgcggccgagagtattgtacgcccacagcactcagtctt

SEQ ID NO: 123 - RNA, 146 nt, synthetic construct
  source 1..146: mol_type = other RNA
gttggaagactgagtgcccggttttagagctagaaatagcaagttaaaataaggctagtccgttatcaacttgaaaaagtggcaccgagtcggtgctcacgatcgatcgcgcggaactgggtatgctccaccgcgcactcagtctt

SEQ ID NO: 124 - RNA, 146 nt, synthetic construct
  source 1..146: mol_type = other RNA
gttggaagactgagtgcccggttttagagctagaaatagcaagttaaaataaggctagtccgttatcaacttgaaaaagtggcaccgagtcggtgcttctcggaggcatgcgggcatttgcatggctccgtcccgcactcagtctt

SEQ ID NO: 125 - RNA, 146 nt, synthetic construct
  source 1..146: mol_type = other RNA
gttggaagactgagtgcccggttttagagctagaaatagcaagttaaaataaggctagtccgttatcaacttgaaaaagtggcaccgagtcggtgctctctgccgctatgcgttcacgccatggcaaaggcgccgcactcagtctt

SEQ ID NO: 126 - RNA, 146 nt, synthetic construct
  source 1..146: mol_type = other RNA
gttggaagactgagtgcccggttttagagctagaaatagcaagttaaaataaggctagtccgttatcaacttgaaaaagtggcaccgagtcggtgctgcatgatggtccgatgctgcctgcctcggcctcatccgcactcagtctt

SEQ ID NO: 127 - RNA, 146 nt, synthetic construct
  source 1..146: mol_type = other RNA
gttggaagactgagtgcccggttttagagctagaaatagcaagttaaaataaggctagtccgttatcaacttgaaaaagtggcaccgagtcggtgctgcgtcgacgcttgcgcatacatgcagaacgggcggtcgcactcagtctt

SEQ ID NO: 128 - RNA, 146 nt, synthetic construct
  source 1..146: mol_type = other RNA
gttggaagactgagtgcccggttttagagctagaaatagcaagttaaaataaggctagtccgttatcaacttgaaaaagtggcaccgagtcggtgctcagctctgtcgaggcccaagccgtggtccttggtgacgcactcagtctt

SEQ ID NO: 129 - RNA, 146 nt, synthetic construct
  source 1..146: mol_type = other RNA
gttggaagactgagtgcccggttttagagctagaaatagcaagttaaaataaggctagtccgttatcaacttgaaaaagtggcaccgagtcggtgctcttccggtacgcgtctcctgggtttcgcccgaaccgagcactcagtctt

SEQ ID NO: 130 - RNA, 146 nt, synthetic construct
  source 1..146: mol_type = other RNA
gttggaagactgagtgcccggttttagagctagaaatagcaagttaaaataaggctagtccgttatcaacttgaaaaagtggcaccgagtcggtgctggcgcaccgcggcggtatctcgggccgagctctgtacgcactcagtctt

SEQ ID NO: 131 - RNA, 146 nt, synthetic construct
  source 1..146: mol_type = other RNA
gttggaagactgagtgcccggttttagagctagaaatagcaagttaaaataaggctagtccgttatcaacttgaaaaagtggcaccgagtcggtgctgccaattgagccgaacagcgcctgcgggcctgccggcgcactcagtctt

SEQ ID NO: 132 - RNA, 146 nt, synthetic construct
  source 1..146: mol_type = other RNA
gttggaagactgagtgcccggttttagagctagaaatagcaagttaaaataaggctagtccgttatcaacttgaaaaagtggcaccgagtcggtgctgtcacacatgctcccggcacctcgcccgacgcacggcgcactcagtctt

SEQ ID NO: 133 - RNA, 146 nt, synthetic construct
  source 1..146: mol_type = other RNA
gttggaagactgagtgcccggttttagagctagaaatagcaagttaaaataaggctagtccgttatcaacttgaaaaagtggcaccgagtcggtgctgcgggcgaacgctgctttcagcggcaccgggcacctcgcactcagtctt

SEQ ID NO: 134 - RNA, 146 nt, synthetic construct
  source 1..146: mol_type = other RNA
gttggaagactgagtgcccggttttagagctagaaatagcaagttaaaataaggctagtccgttatcaacttgaaaaagtggcaccgagtcggtgcttgccgcacgccgagccttctctacgggcccgggcgaagcactcagtctt

SEQ ID NO: 135 - RNA, 146 nt, synthetic construct
  source 1..146: mol_type = other RNA
gttggaagactgagtgcccggttttagagctagaaatagcaagttaaaataaggctagtccgttatcaacttgaaaaagtggcaccgagtcggtgctgcccgccacgctgcgtccagggacgggaaacgtcaccgcactcagtctt

SEQ ID NO: 136 - RNA, 146 nt, synthetic construct
  source 1..146: mol_type = other RNA
gttggaagactgagtgcccggttttagagctagaaatagcaagttaaaataaggctagtccgttatcaacttgaaaaagtggcaccgagtcggtgctacggcggccggacctctccgcgttacgcctgcatggcgcactcagtctt

SEQ ID NO: 137 - RNA, 146 nt, synthetic construct
  source 1..146: mol_type = other RNA
gttggaagactgagtgcccggttttagagctagaaatagcaagttaaaataaggctagtccgttatcaacttgaaaaagtggcaccgagtcggtgctgctgcgagaaccgcctatcagccgggcgcacgctgccgcactcagtctt

SEQ ID NO: 138 - RNA, 146 nt, synthetic construct
  source 1..146: mol_type = other RNA
gttggaagactgagtgcccggttttagagctagaaatagcaagttaaaataaggctagtccgttatcaacttgaaaaagtggcaccgagtcggtgctgtgcccaggctttatcggccgcctgccgcgcgttgccgcactcagtctt

SEQ ID NO: 139 - RNA, 146 nt, synthetic construct
  source 1..146: mol_type = other RNA
gttggaagactgagtgcccggttttagagctagaaatagcaagttaaaataaggctagtccgttatcaacttgaaaaagtggcaccgagtcggtgctgcatcgcggtgcggcccgagccgtcggcgggccttccgcactcagtctt

SEQ ID NO: 140 - RNA, 146 nt, synthetic construct
  source 1..146: mol_type = other RNA
gttggaagactgagtgcccggttttagagctagaaatagcaagttaaaataaggctagtccgttatcaacttgaaaaagtggcaccgagtcggtgctacgcacacccggcccgggagcgactcggccgcgtggcgcactcagtctt

SEQ ID NO: 141 - RNA, 146 nt, synthetic construct
  source 1..146: mol_type = other RNA
gttggaagactgagtgcccggttttagagctagaaatagcaagttaaaataaggctagtccgttatcaacttgaaaaagtggcaccgagtcggtgctggccgactccggaccgtcacctcgcgcggagcgcggcgcactcagtctt

SEQ ID NO: 142 - RNA, 146 nt, synthetic construct
  source 1..146: mol_type = other RNA
gttggaagactgagtgcccggttttagagctagaaatagcaagttaaaataaggctagtccgttatcaacttgaaaaagtggcaccgagtcggtgctgcgcgccaccacgcgcgcgtggcctccgcacgagaccgcactcagtctt

SEQ ID NO: 143 - RNA, 146 nt, synthetic construct
  source 1..146: mol_type = other RNA
gttggaagactgagtgcccggttttagagctagaaatagcaagttaaaataaggctagtccgttatcaacttgaaaaagtggcaccgagtcggtgctggcggatgagccgcccagaaggcggcgagggccggccgcactcagtctt

SEQ ID NO: 144 - RNA, 146 nt, synthetic construct
  source 1..146: mol_type = other RNA
gttggaagactgagtgcccggttttagagctagaaatagcaagttaaaataaggctagtccgttatcaacttgaaaaagtggcaccgagtcggtgctgccaggtcgaccgaggccgcgggcccgggaagacggcgcactcagtctt

SEQ ID NO: 145 - RNA, 146 nt, synthetic construct
  source 1..146: mol_type = other RNA
gttggaagactgagtgcccggttttagagctagaaatagcaagttaaaataaggctagtccgttatcaacttgaaaaagtggcaccgagtcggtgctcgcccggcgccgggatgtgcgccgcggagcccggaaagcactcagtctt

SEQ ID NO: 146 - RNA, 146 nt, synthetic construct
  source 1..146: mol_type = other RNA
gttggaagactgagtgcccggttttagagctagaaatagcaagttaaaataaggctagtccgttatcaacttgaaaaagtggcaccgagtcggtgctcgaagccgcggctggcgcggacgtgcccggcgagcacgcactcagtctt

SEQ ID NO: 147 - RNA, 146 nt, synthetic construct
  source 1..146: mol_type = other RNA
gttggaagactgagtgcccggttttagagctagaaatagcaagttaaaataaggctagtccgttatcaacttgaaaaagtggcaccgagtcggtgctccgtacgggcccagggtacgcccgcgtgccgggcagcgcactcagtctt

SEQ ID NO: 148 - RNA, 131 nt, synthetic construct
  source 1..131: mol_type = other RNA
gttggaagactgagtgcccggttttagagctagaaatagcaagttaaaataaggctagtccgttatcaacttgaaaaagtggcaccgagtcggtgctccgcctcttatctgtgggccgcgcactcagtctt

SEQ ID NO: 149 - RNA, 131 nt, synthetic construct
  source 1..131: mol_type = other RNA
gttggaagactgagtgcccggttttagagctagaaatagcaagttaaaataaggctagtccgttatcaacttgaaaaagtggcaccgagtcggtgctgccaaccgtcgggtccatgcgagcactcagtctt

SEQ ID NO: 150 - RNA, 131 nt, synthetic construct
  source 1..131: mol_type = other RNA
gttggaagactgagtgcccggttttagagctagaaatagcaagttaaaataaggctagtccgttatcaacttgaaaaagtggcaccgagtcggtgcttcgagcgcacccgcaacaagccgcactcagtctt

SEQ ID NO: 151 - RNA, 131 nt, synthetic construct
  source 1..131: mol_type = other RNA
gttggaagactgagtgcccggttttagagctagaaatagcaagttaaaataaggctagtccgttatcaacttgaaaaagtggcaccgagtcggtgcttcgcgcagcagggttgcgaaccgcactcagtctt

SEQ ID NO: 152 - RNA, 131 nt, synthetic construct
  source 1..131: mol_type = other RNA
gttggaagactgagtgcccggttttagagctagaaatagcaagttaaaataaggctagtccgttatcaacttgaaaaagtggcaccgagtcggtgctttggccggtgcgggacaggtacgcactcagtctt

SEQ ID NO: 153 - RNA, 131 nt, synthetic construct
  source 1..131: mol_type = other RNA
gttggaagactgagtgcccggttttagagctagaaatagcaagttaaaataaggctagtccgttatcaacttgaaaaagtggcaccgagtcggtgctcgtttggcgatggcctcctcccgcactcagtctt

SEQ ID NO: 154 - RNA, 131 nt, synthetic construct
  source 1..131: mol_type = other RNA
gttggaagactgagtgcccggttttagagctagaaatagcaagttaaaataaggctagtccgttatcaacttgaaaaagtggcaccgagtcggtgctctcggcgagccgtctacgtgtcgcactcagtctt

SEQ ID NO: 155 - RNA, 131 nt, synthetic construct
  source 1..131: mol_type = other RNA
gttggaagactgagtgcccggttttagagctagaaatagcaagttaaaataaggctagtccgttatcaacttgaaaaagtggcaccgagtcggtgctcgtggtctcgggcatcagacccgcactcagtctt

SEQ ID NO: 156 - RNA, 131 nt, synthetic construct
  source 1..131: mol_type = other RNA
gttggaagactgagtgcccggttttagagctagaaatagcaagttaaaataaggctagtccgttatcaacttgaaaaagtggcaccgagtcggtgctgcccagtccgtgtctctgcgcagcactcagtctt

SEQ ID NO: 157 - RNA, 161 nt, synthetic construct
  source 1..161: mol_type = other RNA
gttggaagactgagtgcccggttttagagctagaaatagcaagttaaaataaggctagtccgttatcaacttgaaaaagtggcaccgagtcggtgctgcgtttgtgcaatgggcggcgcagtgggccgcgcatgtatcgccacagatcagcactcagtctt

SEQ ID NO: 158 - RNA, 161 nt, synthetic construct
  source 1..161: mol_type = other RNA
gttggaagactgagtgcccggttttagagctagaaatagcaagttaaaataaggctagtccgttatcaacttgaaaaagtggcaccgagtcggtgctcggaggccacggtcgccacagcaacgtggctgtttcactatggatgtcgggcgcactcagtctt

SEQ ID NO: 159 - RNA, 161 nt, synthetic construct
  source 1..161: mol_type = other RNA
gttggaagactgagtgcccggttttagagctagaaatagcaagttaaaataaggctagtccgttatcaacttgaaaaagtggcaccgagtcggtgctctcggtcacgcacggcgcagctcggacaacccgacacgcattgctactccaagcactcagtctt

SEQ ID NO: 160 - RNA, 161 nt, synthetic construct
  source 1..161: mol_type = other RNA
gttggaagactgagtgcccggttttagagctagaaatagcaagttaaaataaggctagtccgttatcaacttgaaaaagtggcaccgagtcggtgcttgctccgtggtatcggtcccgagccatatcaggtttgccgccgcgcaagggagcactcagtctt

SEQ ID NO: 161 - RNA, 176 nt, synthetic construct
  source 1..176: mol_type = other RNA
gttggaagactgagtgcccggttttagagctagaaatagcaagttaaaataaggctagtccgttatcaacttgaaaaagtggcaccgagtcggtgcttgggtgtggcgccaacgggagtgcggcctgggtacctattattgcggccgttgtggtggagaggaccgcactcagtctt

SEQ ID NO: 162 - RNA, 176 nt, synthetic construct
  source 1..176: mol_type = other RNA
gttggaagactgagtgcccggttttagagctagaaatagcaagttaaaataaggctagtccgttatcaacttgaaaaagtggcaccgagtcggtgctcgctggcgtcgtacgcggagtgtgcaagagctgggtggcgaaagtcaagcagaccctggctgcaccagcactcagtctt

SEQ ID NO: 163 - RNA, 176 nt, synthetic construct
  source 1..176: mol_type = other RNA
gttggaagactgagtgcccggttttagagctagaaatagcaagttaaaataaggctagtccgttatcaacttgaaaaagtggcaccgagtcggtgctcggctgtggcaggccgggaagctccatgtacacgctgcaaggcgaagctacccagccgtcaggaacagcactcagtctt

SEQ ID NO: 164 - RNA, 176 nt, synthetic construct
  source 1..176: mol_type = other RNA
gttggaagactgagtgcccggttttagagctagaaatagcaagttaaaataaggctagtccgttatcaacttgaaaaagtggcaccgagtcggtgcttaccgggcagtgtcctttctgcgcagcagggtcgtaccggactacgcaggaggaaggcttccgcgtcgcactcagtctt

SEQ ID NO: 165 - RNA, 176 nt, synthetic construct
  source 1..176: mol_type = other RNA
gttggaagactgagtgcccggttttagagctagaaatagcaagttaaaataaggctagtccgttatcaacttgaaaaagtggcaccgagtcggtgctacaacgcggatcagggcatccatccacagcgtgcgcgaacggcggtgtcccgagatgggtggtatgcgcactcagtctt

SEQ ID NO: 166 - RNA, 176 nt, synthetic construct
  source 1..176: mol_type = other RNA
gttggaagactgagtgcccggttttagagctagaaatagcaagttaaaataaggctagtccgttatcaacttgaaaaagtggcaccgagtcggtgctcctctcgcctgaatcggactggacagcttcgtgggatggctcgaagagcctccggaggcggtctaccgcactcagtctt

SEQ ID NO: 167 - RNA, 176 nt, synthetic construct
  source 1..176: mol_type = other RNA
gttggaagactgagtgcccggttttagagctagaaatagcaagttaaaataaggctagtccgttatcaacttgaaaaagtggcaccgagtcggtgcttgccgactgatactgcgtccttacgcccgattgcgttacaagggtgcaagcggacgcccgcgcagccgcactcagtctt

SEQ ID NO: 168 - RNA, 176 nt, synthetic construct
  source 1..176: mol_type = other RNA
gttggaagactgagtgcccggttttagagctagaaatagcaagttaaaataaggctagtccgttatcaacttgaaaaagtggcaccgagtcggtgctcccggagcgaaaccggccaacgaagcgaaagggtggccctgcagtggatatgtggcggctgtcttccgcactcagtctt

SEQ ID NO: 169 - RNA, 176 nt, synthetic construct
  source 1..176: mol_type = other RNA
gttggaagactgagtgcccggttttagagctagaaatagcaagttaaaataaggctagtccgttatcaacttgaaaaagtggcaccgagtcggtgctccagcaagaggcaacccacccacgcgaagccaccacttgcgccgacgacggaacctcgctcgatttcgcactcagtctt

SEQ ID NO: 170 - RNA, 191 nt, synthetic construct
  source 1..191: mol_type = other RNA
gttggaagactgagtgcccggttttagagctagaaatagcaagttaaaataaggctagtccgttatcaacttgaaaaagtggcaccgagtcggtgctccgaggaggacagagccaaggacagcccttcctcaatctactcacgatcgacgtgcgcggccttgaagcggcgaggtcacgcgcactcagtctt

SEQ ID NO: 171 - RNA, 191 nt, synthetic construct
  source 1..191: mol_type = other RNA
gttggaagactgagtgcccggttttagagctagaaatagcaagttaaaataaggctagtccgttatcaacttgaaaaagtggcaccgagtcggtgctcccgccttcacaccctcgagatactgcgcgctcagccttcacacctatcgcgcacagtcggaccgggctgtactggatgggagcactcagtctt

SEQ ID NO: 172 - RNA, 191 nt, synthetic construct
  source 1..191: mol_type = other RNA
gttggaagactgagtgcccggttttagagctagaaatagcaagttaaaataaggctagtccgttatcaacttgaaaaagtggcaccgagtcggtgcttgcagccaattgtggcaacaccggaagccaaggcacaggatgccgatcgccggtgggcgcgccacttgctggccaagctatcgcactcagtctt

SEQ ID NO: 173 - RNA, 191 nt, synthetic construct
  source 1..191: mol_type = other RNA
gttggaagactgagtgcccggttttagagctagaaatagcaagttaaaataaggctagtccgttatcaacttgaaaaagtggcaccgagtcggtgcttggccaaagacaccacgagaaatgcccaatcagggtggcagggactgccacgaagcggactgcgacgaaggcgcgcacagccgcactcagtctt

SEQ ID NO: 174 - RNA, 191 nt, synthetic construct
  source 1..191: mol_type = other RNA
gttggaagactgagtgcccggttttagagctagaaatagcaagttaaaataaggctagtccgttatcaacttgaaaaagtggcaccgagtcggtgcttactgagtggcccgtacgcgcagggccgtcggcagaactcagtgtcgaccgacggcagatggtccgtcttctggtcatcccagcactcagtctt

SEQ ID NO: 175 - RNA, 191 nt, synthetic construct
  source 1..191: mol_type = other RNA
gttggaagactgagtgcccggttttagagctagaaatagcaagttaaaataaggctagtccgttatcaacttgaaaaagtggcaccgagtcggtgctcgcggcctgcggttcggtacgttgcgtttcaaaccggtcttcctgcacgtctgcttgcggagcttcgaaagtcgccggagccgcactcagtctt

SEQ ID NO: 176 - RNA, 191 nt, synthetic construct
  source 1..191: mol_type = other RNA
gttggaagactgagtgcccggttttagagctagaaatagcaagttaaaataaggctagtccgttatcaacttgaaaaagtggcaccgagtcggtgctggcgcctgagccgtttgaaagaggcactcgtgccatattgcctcgacgcctctggcaacgccactccggtgtcccgtgtggagcactcagtctt

SEQ ID NO: 177 - RNA, 191 nt, synthetic construct
  source 1..191: mol_type = other RNA
gttggaagactgagtgcccggttttagagctagaaatagcaagttaaaataaggctagtccgttatcaacttgaaaaagtggcaccgagtcggtgctcatacgcggcaatcgcgtccttctgtacggacccactacggttgccgctatgtcagagacggcggcgttgcacagccgtgccgcactcagtctt

SEQ ID NO: 178 - RNA, 191 nt, synthetic construct
  source 1..191: mol_type = other RNA
gttggaagactgagtgcccggttttagagctagaaatagcaagttaaaataaggctagtccgttatcaacttgaaaaagtggcaccgagtcggtgctcccactaccgtcagactcgctcagaacagaccagatcacggcggcgggatccgccttgtcaaggagagcggagcgtacacccgcactcagtctt

SEQ ID NO: 179 - RNA, 191 nt, synthetic construct
  source 1..191: mol_type = other RNA
gttggaagactgagtgcccggttttagagctagaaatagcaagttaaaataaggctagtccgttatcaacttgaaaaagtggcaccgagtcggtgctgggcgacttacgattggagcattctcctcggctttgttggctcagcgcgacccgctgggaggaggaggacacctgggagcgagcactcagtctt

SEQ ID NO: 180 - RNA, 132 nt, synthetic construct
  source 1..132: mol_type = other RNA
gttggaagactgagtgcccggttttagagctagaaatagcaagttaaaataaggctagtccgttatcaacttgaaaaagtggcaccgagtcggtgcacgatgatggtgatgatggtgtgcgcactcagtctt

SEQ ID NO: 181 - RNA, 131 nt, synthetic construct
  source 1..131: mol_type = other RNA
gttggaagactgagtgcccggttttagagctagaaatagcaagttaaaataaggctagtccgttatcaacttgaaaaagtggcaccgagtcggtgcaaacagacattgtgcctgtgcatgcgcactcagtc

SEQ ID NO: 182 - RNA, 136 nt, synthetic construct
  source 1..136: mol_type = other RNA
gttggaagactgagtgcccggttttagagctagaaatagcaagttaaaataaggctagtccgttatcaacttgaaaaagtggcaccgagtcggtgcaaagggttgcactttgctgatacgtggggtgcactcagtc

SEQ ID NO: 183 - RNA, 136 nt, synthetic construct
  source 1..136: mol_type = other RNA
gttggaagactgagtgcccggttttagagctagaaatagcaagttaaaataaggctagtccgttatcaacttgaaaaagtggcaccgagtcggtgcaagacaccgcctgggccccgattgatatgggcactcagtc

SEQ ID NO: 184 - RNA, 134 nt, synthetic construct
  source 1..134: mol_type = other RNA
gttggaagactgagtgcccggttttagagctagaaatagcaagttaaaataaggctagtccgttatcaacttgaaaaagtggcaccgagtcggtgcaagccctgcgcagcggtccgtccgccgagcactcagtc

SEQ ID NO: 185 - RNA, 126 nt, synthetic construct
  source 1..126: mol_type = other RNA
gttggaagactgagtgcccggttttagagctagaaatagcaagttaaaataaggctagtccgttatcaacttgaaaaagtggcaccgagtcggtgcaagcgagtcagaagagagaggcactcagtc

SEQ ID NO: 186 - RNA, 141 nt, synthetic construct
  source 1..141: mol_type = other RNA
gttggaagactgagtgcccggttttagagctagaaatagcaagttaaaataaggctagtccgttatcaacttgaaaaagtggcaccgagtcggtgcaagtagggcaggggacatccggtcccgctagcgcggcactcagtc

SEQ ID NO: 187 - RNA, 136 nt, synthetic construct
  source 1..136: mol_type = other RNA
gttggaagactgagtgcccggttttagagctagaaatagcaagttaaaataaggctagtccgttatcaacttgaaaaagtggcaccgagtcggtgcaatcggcgaacgaaacccgaagcgcacgtggcactcagtc

SEQ ID NO: 188 - RNA, 121 nt, synthetic construct
  source 1..121: mol_type = other RNA
gttggaagactgagtgcccggttttagagctagaaatagcaagttaaaataaggctagtccgttatcaacttgaaaaagtggcaccgagtcggtgcaattctgatgtaaaggcactcagtc

SEQ ID NO: 189 - RNA, 124 nt, synthetic construct
  source 1..124: mol_type = other RNA
gttggaagactgagtgcccggttttagagctagaaatagcaagttaaaataaggctagtccgttatcaacttgaaaaagtggcaccgagtcggtgcaatttcaagatcctgcctgcactcagtc

SEQ ID NO: 190 - RNA, 121 nt, synthetic construct
  source 1..121: mol_type = other RNA
gttggaagactgagtgcccggttttagagctagaaatagcaagttaaaataaggctagtccgttatcaacttgaaaaagtggcaccgagtcggtgcacagctgggcaggtggcactcagtc

SEQ ID NO: 191 - RNA, 141 nt, synthetic construct
  source 1..141: mol_type = other RNA
gttggaagactgagtgcccggttttagagctagaaatagcaagttaaaataaggctagtccgttatcaacttgaaaaagtggcaccgagtcggtgcaccgttaccgccgaacgacctcgcgggctcaacacgcactcagtc

SEQ ID NO: 192 - RNA, 121 nt, synthetic construct
  source 1..121: mol_type = other RNA
gttggaagactgagtgcccggttttagagctagaaatagcaagttaaaataaggctagtccgttatcaacttgaaaaagtggcaccgagtcggtgcacctttggccgttctgcactcagtc

SEQ ID NO: 193 - RNA, 131 nt, synthetic construct
  source 1..131: mol_type = other RNA
gttggaagactgagtgcccggttttagagctagaaatagcaagttaaaataaggctagtccgttatcaacttgaaaaagtggcaccgagtcggtgcacgcaggccttgcctccacgacggcgcactcagtc

SEQ ID NO: 194 - RNA, 126 nt, synthetic construct
  source 1..126: mol_type = other RNA
gttggaagactgagtgcccggttttagagctagaaatagcaagttaaaataaggctagtccgttatcaacttgaaaaagtggcaccgagtcggtgcacgccatggagggatagtccgcactcagtc

SEQ ID NO: 195 - RNA, 134 nt, synthetic construct
  source 1..134: mol_type = other RNA
gttggaagactgagtgcccggttttagagctagaaatagcaagttaaaataaggctagtccgttatcaacttgaaaaagtggcaccgagtcggtgcacgccctcgagcacccaggcgacccctagcactcagtc

SEQ ID NO: 196 - RNA, 121 nt, synthetic construct
  source 1..121: mol_type = other RNA
gttggaagactgagtgcccggttttagagctagaaatagcaagttaaaataaggctagtccgttatcaacttgaaaaagtggcaccgagtcggtgcacgcgcgttaccccagcactcagtc

SEQ ID NO: 197 - RNA, 134 nt, synthetic construct
  source 1..134: mol_type = other RNA
gttggaagactgagtgcccggttttagagctagaaatagcaagttaaaataaggctagtccgttatcaacttgaaaaagtggcaccgagtcggtgcacggcgcgcaacaacggccacctcccgggcactcagtc

SEQ ID NO: 198 - RNA, 126 nt, synthetic construct
  source 1..126: mol_type = other RNA
gttggaagactgagtgcccggttttagagctagaaatagcaagttaaaataaggctagtccgttatcaacttgaaaaagtggcaccgagtcggtgcacgggacatttgttatctcagcactcagtc

SEQ ID NO: 199 - RNA, 124 nt, synthetic construct
  source 1..124: mol_type = other RNA
gttggaagactgagtgcccggttttagagctagaaatagcaagttaaaataaggctagtccgttatcaacttgaaaaagtggcaccgagtcggtgcactacgggtgggaacctcgcactcagtc

SEQ ID NO: 200 - RNA, 128 nt, synthetic construct
  source 1..128: mol_type = other RNA
gttggaagactgagtgcccggttttagagctagaaatagcaagttaaaataaggctagtccgttatcaacttgaaaaagtggcaccgagtcggtgcactatacggaccgagtccgccagcactcagtc

SEQ ID NO: 201 - RNA, 124 nt, synthetic construct
  source 1..124: mol_type = other RNA
gttggaagactgagtgcccggttttagagctagaaatagcaagttaaaataaggctagtccgttatcaacttgaaaaagtggcaccgagtcggtgcactctatcgattatctgcgcactcagtc

SEQ ID NO: 202 - RNA, 141 nt, synthetic construct
  source 1..141: mol_type = other RNA
gttggaagactgagtgcccggttttagagctagaaatagcaagttaaaataaggctagtccgttatcaacttgaaaaagtggcaccgagtcggtgcactgccggggccggcgccgtcgcagcgtccgatgcgcactcagtc

SEQ ID NO: 203 - RNA, 126 nt, synthetic construct
  source 1..126: mol_type = other RNA
gttggaagactgagtgcccggttttagagctagaaatagcaagttaaaataaggctagtccgttatcaacttgaaaaagtggcaccgagtcggtgcacttcacatccagtgacgaggcactcagtc

SEQ ID NO: 204 - RNA, 126 nt, synthetic construct
  source 1..126: mol_type = other RNA
gttggaagactgagtgcccggttttagagctagaaatagcaagttaaaataaggctagtccgttatcaacttgaaaaagtggcaccgagtcggtgcagagcggcggcccggccgtggcactcagtc

SEQ ID NO: 205 - RNA, 134 nt, synthetic construct
  source 1..134: mol_type = other RNA
gttggaagactgagtgcccggttttagagctagaaatagcaagttaaaataaggctagtccgttatcaacttgaaaaagtggcaccgagtcggtgcagcatatttcacctattggacctgggcggcactcagtc

SEQ ID NO: 206 - RNA, 124 nt, synthetic construct
  source 1..124: mol_type = other RNA
gttggaagactgagtgcccggttttagagctagaaatagcaagttaaaataaggctagtccgttatcaacttgaaaaagtggcaccgagtcggtgcagcccgcgcgttacacgcgcactcagtc

SEQ ID NO: 207 - RNA, 128 nt, synthetic construct
  source 1..128: mol_type = other RNA
gttggaagactgagtgcccggttttagagctagaaatagcaagttaaaataaggctagtccgttatcaacttgaaaaagtggcaccgagtcggtgcagcctgccccgggccgcggtgggcactcagtc

SEQ ID NO: 208 - RNA, 126 nt, synthetic construct
  source 1..126: mol_type = other RNA
gttggaagactgagtgcccggttttagagctagaaatagcaagttaaaataaggctagtccgttatcaacttgaaaaagtggcaccgagtcggtgcagcggcttcgaatctcaggcgcactcagtc

SEQ ID NO: 209 - RNA, 116 nt, synthetic construct
  source 1..116: mol_type = other RNA
gttggaagactgagtgcccggttttagagctagaaatagcaagttaaaataaggctagtccgttatcaacttgaaaaagtggcaccgagtcggtgcagcggggaccgcactcagtc

SEQ ID NO: 210 - RNA, 134 nt, synthetic construct
  source 1..134: mol_type = other RNA
gttggaagactgagtgcccggttttagagctagaaatagcaagttaaaataaggctagtccgttatcaacttgaaaaagtggcaccgagtcggtgcagctgcagcccgcctccacgacgggcgggcactcagtc

SEQ ID NO: 211 - RNA, 128 nt, synthetic construct
  source 1..128: mol_type = other RNA
gttggaagactgagtgcccggttttagagctagaaatagcaagttaaaataaggctagtccgttatcaacttgaaaaagtggcaccgagtcggtgcaggaacatcaagtgctagaagagcactcagtc

SEQ ID NO: 212 - RNA, 121 nt, synthetic construct
  source 1..121: mol_type = other RNA
gttggaagactgagtgcccggttttagagctagaaatagcaagttaaaataaggctagtccgttatcaacttgaaaaagtggcaccgagtcggtgcaggatcatcgatttggcactcagtc

SEQ ID NO: 213 - RNA, 128 nt, synthetic construct
  source 1..128: mol_type = other RNA
gttggaagactgagtgcccggttttagagctagaaatagcaagttaaaataaggctagtccgttatcaacttgaaaaagtggcaccgagtcggtgcaggatgggtagaataacgacccgcactcagtc

SEQ ID NO: 214 - RNA, 128 nt, synthetic construct
  source 1..128: mol_type = other RNA
gttggaagactgagtgcccggttttagagctagaaatagcaagttaaaataaggctagtccgttatcaacttgaaaaagtggcaccgagtcggtgcagtcataccacgcacatcataagcactcagtc

SEQ ID NO: 215 - RNA, 131 nt, synthetic construct
  source 1..131: mol_type = other RNA
gttggaagactgagtgcccggttttagagctagaaatagcaagttaaaataaggctagtccgttatcaacttgaaaaagtggcaccgagtcggtgcagttcgcttccatagcatttaaccagcactcagtc

SEQ ID NO: 216 - RNA, 146 nt, synthetic construct
  source 1..146: mol_type = other RNA
gttggaagactgagtgcccggttttagagctagaaatagcaagttaaaataaggctagtccgttatcaacttgaaaaagtggcaccgagtcggtgcatactgccggccgagagtaaaggacaggtcattagggtatgcactcagtc

SEQ ID NO: 217 - RNA, 134 nt, synthetic construct
  source 1..134: mol_type = other RNA
gttggaagactgagtgcccggttttagagctagaaatagcaagttaaaataaggctagtccgttatcaacttgaaaaagtggcaccgagtcggtgcatatctcgttggtatttaatatgatacggcactcagtc

SEQ ID NO: 218 - RNA, 134 nt, synthetic construct
  source 1..134: mol_type = other RNA
gttggaagactgagtgcccggttttagagctagaaatagcaagttaaaataaggctagtccgttatcaacttgaaaaagtggcaccgagtcggtgcatcaagcgacgcacgcgtgcctccagaagcactcagtc

SEQ ID NO: 219 - RNA, 124 nt, synthetic construct
  source 1..124: mol_type = other RNA
gttggaagactgagtgcccggttttagagctagaaatagcaagttaaaataaggctagtccgttatcaacttgaaaaagtggcaccgagtcggtgcatcgcgcgctggtggccggcactcagtc

SEQ ID NO: 220 - RNA, 144 nt, synthetic construct
  source 1..144: mol_type = other RNA
gttggaagactgagtgcccggttttagagctagaaatagcaagttaaaataaggctagtccgttatcaacttgaaaaagtggcaccgagtcggtgcatgatcctgacgacggagaccgccgtcgtcgacaagccgcactcagtc

SEQ ID NO: 221 - RNA, 124 nt, synthetic construct
  source 1..124: mol_type = other RNA
gttggaagactgagtgcccggttttagagctagaaatagcaagttaaaataaggctagtccgttatcaacttgaaaaagtggcaccgagtcggtgcatgcgcgcgctgtcgggcgcactcagtc

SEQ ID NO: 222 - RNA, 131 nt, synthetic construct
  source 1..131: mol_type = other RNA
gttggaagactgagtgcccggttttagagctagaaatagcaagttaaaataaggctagtccgttatcaacttgaaaaagtggcaccgagtcggtgcatgcgtccacgcgcccaggctgtaagcactcagtc

SEQ ID NO: 223 - RNA, 131 nt, synthetic construct
  source 1..131: mol_type = other RNA
gttggaagactgagtgcccggttttagagctagaaatagcaagttaaaataaggctagtccgttatcaacttgaaaaagtggcaccgagtcggtgcatggcagtaggtgtcaatactacgggcactcagtc

SEQ ID NO: 224 - RNA, 136 nt, synthetic construct
  source 1..136: mol_type = other RNA
gttggaagactgagtgcccggttttagagctagaaatagcaagttaaaataaggctagtccgttatcaacttgaaaaagtggcaccgagtcggtgcatggcggactcagcgcgccgaagaacggaggcactcagtc

SEQ ID NO: 225 - RNA, 141 nt, synthetic construct
  source 1..141: mol_type = other RNA
gttggaagactgagtgcccggttttagagctagaaatagcaagttaaaataaggctagtccgttatcaacttgaaaaagtggcaccgagtcggtgcatggggccttaacgacccgcgccccgcctctcagtgcactcagtc

SEQ ID NO: 226 - RNA, 121 nt, synthetic construct
  source 1..121: mol_type = other RNA
gttggaagactgagtgcccggttttagagctagaaatagcaagttaaaataaggctagtccgttatcaacttgaaaaagtggcaccgagtcggtgcatgtacgggccgtccgcactcagtc

SEQ ID NO: 227 - RNA, 121 nt, synthetic construct
  source 1..121: mol_type = other RNA
gttggaagactgagtgcccggttttagagctagaaatagcaagttaaaataaggctagtccgttatcaacttgaaaaagtggcaccgagtcggtgcattgttcgcaagcgggcactcagtc

SEQ ID NO: 228 - RNA, 136 nt, synthetic construct
  source 1..136: mol_type = other RNA
gttggaagactgagtgcccggttttagagctagaaatagcaagttaaaataaggctagtccgttatcaacttgaaaaagtggcaccgagtcggtgccaagttgtgcccctagtgagcttggattacgcactcagtc

SEQ ID NO: 229 - RNA, 146 nt, synthetic construct
  source 1..146: mol_type = other RNA
gttggaagactgagtgcccggttttagagctagaaatagcaagttaaaataaggctagtccgttatcaacttgaaaaagtggcaccgagtcggtgccaatgttcgtataaccgtccctagtgtgtctgttactaaagcactcagtc

SEQ ID NO: 230 - RNA, 141 nt, synthetic construct
  source 1..141: mol_type = other RNA
gttggaagactgagtgcccggttttagagctagaaatagcaagttaaaataaggctagtccgttatcaacttgaaaaagtggcaccgagtcggtgccacccggcccgccgctcccgggcccggggccgggggcactcagtc

SEQ ID NO: 231 - RNA, 116 nt, synthetic construct
  source 1..116: mol_type = other RNA
gttggaagactgagtgcccggttttagagctagaaatagcaagttaaaataaggctagtccgttatcaacttgaaaaagtggcaccgagtcggtgccaccggcggggcactcagtc

SEQ ID NO: 232 - RNA, 136 nt, synthetic construct
  source 1..136: mol_type = other RNA
gttggaagactgagtgcccggttttagagctagaaatagcaagttaaaataaggctagtccgttatcaacttgaaaaagtggcaccgagtcggtgccactattacaggaaattgagtaactgggctgcactcagtc

SEQ ID NO: 233 - RNA, 134 nt, synthetic construct
  source 1..134: mol_type = other RNA
gttggaagactgagtgcccggttttagagctagaaatagcaagttaaaataaggctagtccgttatcaacttgaaaaagtggcaccgagtcggtgccagacggtggcgcactcatgccacgcttgcactcagtc

SEQ ID NO: 234 - RNA, 136 nt, synthetic construct
  source 1..136: mol_type = other RNA
gttggaagactgagtgcccggttttagagctagaaatagcaagttaaaataaggctagtccgttatcaacttgaaaaagtggcaccgagtcggtgccagcgccccgccggcgtaccgccctagcaggcactcagtc

SEQ ID NO: 235 - RNA, 116 nt, synthetic construct
  source 1..116: mol_type = other RNA
gttggaagactgagtgcccggttttagagctagaaatagcaagttaaaataaggctagtccgttatcaacttgaaaaagtggcaccgagtcggtgccatagctgctgcactcagtc

SEQ ID NO: 236 - RNA, 124 nt, synthetic construct
  source 1..124: mol_type = other RNA
gttggaagactgagtgcccggttttagagctagaaatagcaagttaaaataaggctagtccgttatcaacttgaaaaagtggcaccgagtcggtgccatcagcggagctccccggcactcagtc

SEQ ID NO: 237 - RNA, 134 nt, synthetic construct
  source 1..134: mol_type = other RNA
gttggaagactgagtgcccggttttagagctagaaatagcaagttaaaataaggctagtccgttatcaacttgaaaaagtggcaccgagtcggtgccatcggtggtcacttggcggagctcgtggcactcagtc

SEQ ID NO: 238 - RNA, 124 nt, synthetic construct
  source 1..124: mol_type = other RNA
gttggaagactgagtgcccggttttagagctagaaatagcaagttaaaataaggctagtccgttatcaacttgaaaaagtggcaccgagtcggtgccattgcatacctatagtggcactcagtc

SEQ ID NO: 239 - RNA, 134 nt, synthetic construct
  source 1..134: mol_type = other RNA
gttggaagactgagtgcccggttttagagctagaaatagcaagttaaaataaggctagtccgttatcaacttgaaaaagtggcaccgagtcggtgcccaggacaaggaacgattgaatggtgcagcactcagtc

SEQ ID NO: 240 - RNA, 128 nt, synthetic construct
  source 1..128: mol_type = other RNA
gttggaagactgagtgcccggttttagagctagaaatagcaagttaaaataaggctagtccgttatcaacttgaaaaagtggcaccgagtcggtgcccaggtggtaccatatggtcccgcactcagtc

SEQ ID NO: 241 - RNA, 126 nt, synthetic construct
  source 1..126: mol_type = other RNA
gttggaagactgagtgcccggttttagagctagaaatagcaagttaaaataaggctagtccgttatcaacttgaaaaagtggcaccgagtcggtgcccagtcggccctgctccggcgcactcagtc

SEQ ID NO: 242 - RNA, 128 nt, synthetic construct
  source 1..128: mol_type = other RNA
gttggaagactgagtgcccggttttagagctagaaatagcaagttaaaataaggctagtccgttatcaacttgaaaaagtggcaccgagtcggtgcccccaaccgccggcggccgatggcactcagtc

SEQ ID NO: 243 - RNA, 121 nt, synthetic construct
  source 1..121: mol_type = other RNA
gttggaagactgagtgcccggttttagagctagaaatagcaagttaaaataaggctagtccgttatcaacttgaaaaagtggcaccgagtcggtgcccccgggccggaccggcactcagtc

SEQ ID NO: 244 - RNA, 134 nt, synthetic construct
  source 1..134: mol_type = other RNA
gttggaagactgagtgcccggttttagagctagaaatagcaagttaaaataaggctagtccgttatcaacttgaaaaagtggcaccgagtcggtgcccccgtcgtacgggccgctcccgccgccgcactcagtc

SEQ ID NO: 245 - RNA, 141 nt, synthetic construct
  source 1..141: mol_type = other RNA
gttggaagactgagtgcccggttttagagctagaaatagcaagttaaaataaggctagtccgttatcaacttgaaaaagtggcaccgagtcggtgccccctaggtagccagaagggcgaaaccacgtgctagcactcagtc

SEQ ID NO: 246 - RNA, 131 nt, synthetic construct
  source 1..131: mol_type = other RNA
gttggaagactgagtgcccggttttagagctagaaatagcaagttaaaataaggctagtccgttatcaacttgaaaaagtggcaccgagtcggtgccccctgcgcggaccgcgccttccgtgcactcagtc

SEQ ID NO: 247 - RNA, 141 nt, synthetic construct
  source 1..141: mol_type = other RNA
gttggaagactgagtgcccggttttagagctagaaatagcaagttaaaataaggctagtccgttatcaacttgaaaaagtggcaccgagtcggtgccccgcgccgccagccctagggtggccgctcggcgggcactcagtc

SEQ ID NO: 248 - RNA, 124 nt, synthetic construct
  source 1..124: mol_type = other RNA
gttggaagactgagtgcccggttttagagctagaaatagcaagttaaaataaggctagtccgttatcaacttgaaaaagtggcaccgagtcggtgccccgcgcgaggaggagccgcactcagtc

SEQ ID NO: 249 - RNA, 121 nt, synthetic construct
  source 1..121: mol_type = other RNA
gttggaagactgagtgcccggttttagagctagaaatagcaagttaaaataaggctagtccgttatcaacttgaaaaagtggcaccgagtcggtgccccggcgaccagccggcactcagtc

SEQ ID NO: 250 - RNA, 131 nt, synthetic construct
  source 1..131: mol_type = other RNA
gttggaagactgagtgcccggttttagagctagaaatagcaagttaaaataaggctagtccgttatcaacttgaaaaagtggcaccgagtcggtgccccgggcgccccgcgaggcccggccgcactcagtc

SEQ ID NO: 251 - RNA, 136 nt, synthetic construct
  source 1..136: mol_type = other RNA
gttggaagactgagtgcccggttttagagctagaaatagcaagttaaaataaggctagtccgttatcaacttgaaaaagtggcaccgagtcggtgccccgggtggtggccgcgccggtcagcgcgcgcactcagtc

SEQ ID NO: 252 - RNA, 124 nt, synthetic construct
  source 1..124: mol_type = other RNA
gttggaagactgagtgcccggttttagagctagaaatagcaagttaaaataaggctagtccgttatcaacttgaaaaagtggcaccgagtcggtgcccctcgtacagcgcgccggcactcagtc

SEQ ID NO: 253 - RNA, 128 nt, synthetic construct
  source 1..128: mol_type = other RNA
gttggaagactgagtgcccggttttagagctagaaatagcaagttaaaataaggctagtccgttatcaacttgaaaaagtggcaccgagtcggtgcccgccggctcatcgaaccgcctgcactcagtc

SEQ ID NO: 254 - RNA, 134 nt, synthetic construct
  source 1..134: mol_type = other RNA
gttggaagactgagtgcccggttttagagctagaaatagcaagttaaaataaggctagtccgttatcaacttgaaaaagtggcaccgagtcggtgcccgcgtggggtggcggtgccccggtgccgcactcagtc

SEQ ID NO: 255 - RNA, 126 nt, synthetic construct
  source 1..126: mol_type = other RNA
gttggaagactgagtgcccggttttagagctagaaatagcaagttaaaataaggctagtccgttatcaacttgaaaaagtggcaccgagtcggtgcccggagggctccgaccggaagcactcagtc

SEQ ID NO: 256 - RNA, 116 nt, synthetic construct
  source 1..116: mol_type = other RNA
gttggaagactgagtgcccggttttagagctagaaatagcaagttaaaataaggctagtccgttatcaacttgaaaaagtggcaccgagtcggtgcccggcaaggggcactcagtc

SEQ ID NO: 257 - RNA, 136 nt, synthetic construct
  source 1..136: mol_type = other RNA
gttggaagactgagtgcccggttttagagctagaaatagcaagttaaaataaggctagtccgttatcaacttgaaaaagtggcaccgagtcggtgcccggcgcagggcggaccgacgagagcgtgcgcactcagtc

SEQ ID NO: 258 - RNA, 134 nt, synthetic construct
  source 1..134: mol_type = other RNA
gttggaagactgagtgcccggttttagagctagaaatagcaagttaaaataaggctagtccgttatcaacttgaaaaagtggcaccgagtcggtgcccggggacgccacgcgcggtgcgcggcggcactcagtc

SEQ ID NO: 259 - RNA, 121 nt, synthetic construct
  source 1..121: mol_type = other RNA
gttggaagactgagtgcccggttttagagctagaaatagcaagttaaaataaggctagtccgttatcaacttgaaaaagtggcaccgagtcggtgcccgggtggcgccggggcactcagtc

SEQ ID NO: 260 - RNA, 136 nt, synthetic construct
  source 1..136: mol_type = other RNA
gttggaagactgagtgcccggttttagagctagaaatagcaagttaaaataaggctagtccgttatcaacttgaaaaagtggcaccgagtcggtgcccggtcgtccgttcagagaccatgcggagcgcactcagtc

SEQ ID NO: 261 - RNA, 131 nt, synthetic construct
  source 1..131: mol_type = other RNA
gttggaagactgagtgcccggttttagagctagaaatagcaagttaaaataaggctagtccgttatcaacttgaaaaagtggcaccgagtcggtgccctaccaccctccgcagcgcgcgcggcactcagtc

SEQ ID NO: 262 - RNA, 128 nt, synthetic construct
  source 1..128: mol_type = other RNA
gttggaagactgagtgcccggttttagagctagaaatagcaagttaaaataaggctagtccgttatcaacttgaaaaagtggcaccgagtcggtgccctaggcgggtcggagggccccgcactcagtc

SEQ ID NO: 263 - RNA, 146 nt, synthetic construct
  source 1..146: mol_type = other RNA
gttggaagactgagtgcccggttttagagctagaaatagcaagttaaaataaggctagtccgttatcaacttgaaaaagtggcaccgagtcggtgccctcctcacctttgccagagggacttcgcttgggaacaccgcactcagtc

SEQ ID NO: 264 - RNA, 136 nt, synthetic construct
  source 1..136: mol_type = other RNA
gttggaagactgagtgcccggttttagagctagaaatagcaagttaaaataaggctagtccgttatcaacttgaaaaagtggcaccgagtcggtgccctcggatggggccgcggctacgggtacaggcactcagtc

SEQ ID NO: 265 - RNA, 131 nt, synthetic construct
  source 1..131: mol_type = other RNA
gttggaagactgagtgcccggttttagagctagaaatagcaagttaaaataaggctagtccgttatcaacttgaaaaagtggcaccgagtcggtgcccttgtgggctgcgccgagcagtcggcactcagtc

SEQ ID NO: 266 - RNA, 126 nt, synthetic construct
  source 1..126: mol_type = other RNA
gttggaagactgagtgcccggttttagagctagaaatagcaagttaaaataaggctagtccgttatcaacttgaaaaagtggcaccgagtcggtgccctttagaaggccaggccgggcactcagtc

SEQ ID NO: 267 - RNA, 146 nt, synthetic construct
  source 1..146: mol_type = other RNA
gttggaagactgagtgcccggttttagagctagaaatagcaagttaaaataaggctagtccgttatcaacttgaaaaagtggcaccgagtcggtgccgaccggtgcgggccctcgtcgaggagcaagggtgcaggcgcactcagtc

SEQ ID NO: 268 - RNA, 116 nt, synthetic construct
  source 1..116: mol_type = other RNA
gttggaagactgagtgcccggttttagagctagaaatagcaagttaaaataaggctagtccgttatcaacttgaaaaagtggcaccgagtcggtgccgagcgagcggcactcagtc

SEQ ID NO: 269 - RNA, 134 nt, synthetic construct
  source 1..134: mol_type = other RNA
gttggaagactgagtgcccggttttagagctagaaatagcaagttaaaataaggctagtccgttatcaacttgaaaaagtggcaccgagtcggtgccgagcttacccgtggggaagcaagggatgcactcagtc

SEQ ID NO: 270 - RNA, 136 nt, synthetic construct
  source 1..136: mol_type = other RNA
gttggaagactgagtgcccggttttagagctagaaatagcaagttaaaataaggctagtccgttatcaacttgaaaaagtggcaccgagtcggtgccgaggtagaggcgaggagtagacgccgcgcgcactcagtc

SEQ ID NO: 271 - RNA, 134 nt, synthetic construct
  source 1..134: mol_type = other RNA
gttggaagactgagtgcccggttttagagctagaaatagcaagttaaaataaggctagtccgttatcaacttgaaaaagtggcaccgagtcggtgccgatacggcgcccacggcggtgcattgcgcactcagtc

SEQ ID NO: 272 - RNA, 124 nt, synthetic construct
  source 1..124: mol_type = other RNA
gttggaagactgagtgcccggttttagagctagaaatagcaagttaaaataaggctagtccgttatcaacttgaaaaagtggcaccgagtcggtgccgatcttcccgaacaccggcactcagtc

SEQ ID NO: 273 - RNA, 121 nt, synthetic construct
  source 1..121: mol_type = other RNA
gttggaagactgagtgcccggttttagagctagaaatagcaagttaaaataaggctagtccgttatcaacttgaaaaagtggcaccgagtcggtgccgcacgcggggcccggcactcagtc

SEQ ID NO: 274 - RNA, 141 nt, synthetic construct
  source 1..141: mol_type = other RNA
gttggaagactgagtgcccggttttagagctagaaatagcaagttaaaataaggctagtccgttatcaacttgaaaaagtggcaccgagtcggtgccgcagtcacagggagtcgcgaccgttgctgcattagcactcagtc

SEQ ID NO: 275 - RNA, 141 nt, synthetic construct
  source 1..141: mol_type = other RNA
gttggaagactgagtgcccggttttagagctagaaatagcaagttaaaataaggctagtccgttatcaacttgaaaaagtggcaccgagtcggtgccgcatgtcccgcctctacccaggaagatggcacccgcactcagtc

SEQ ID NO: 276 - RNA, 126 nt, synthetic construct
  source 1..126: mol_type = other RNA
gttggaagactgagtgcccggttttagagctagaaatagcaagttaaaataaggctagtccgttatcaacttgaaaaagtggcaccgagtcggtgccgccccgcggggcgctcgcagcactcagtc

SEQ ID NO: 277 - RNA, 141 nt, synthetic construct
  source 1..141: mol_type = other RNA
gttggaagactgagtgcccggttttagagctagaaatagcaagttaaaataaggctagtccgttatcaacttgaaaaagtggcaccgagtcggtgccgcccggcccgttgaacgggtcactggcatcggccgcactcagtc

SEQ ID NO: 278 - RNA, 141 nt, synthetic construct
  source 1..141: mol_type = other RNA
gttggaagactgagtgcccggttttagagctagaaatagcaagttaaaataaggctagtccgttatcaacttgaaaaagtggcaccgagtcggtgccgccgccagcgcgcgacgcggtgccggccgccgcggcactcagtc

SEQ ID NO: 279 - RNA, 141 nt, synthetic construct
  source 1..141: mol_type = other RNA
gttggaagactgagtgcccggttttagagctagaaatagcaagttaaaataaggctagtccgttatcaacttgaaaaagtggcaccgagtcggtgccgccgcgggctgggcccgggcgcgggcgggcggaagcactcagtc

SEQ ID NO: 280 - RNA, 134 nt, synthetic construct
  source 1..134: mol_type = other RNA
gttggaagactgagtgcccggttttagagctagaaatagcaagttaaaataaggctagtccgttatcaacttgaaaaagtggcaccgagtcggtgccgcgaggacaacctttccaattcggaaagcactcagtc

SEQ ID NO: 281 - RNA, 124 nt, synthetic construct
  source 1..124: mol_type = other RNA
gttggaagactgagtgcccggttttagagctagaaatagcaagttaaaataaggctagtccgttatcaacttgaaaaagtggcaccgagtcggtgccgcgcacgccggggtgccgcactcagtc

SEQ ID NO: 282 - RNA, 131 nt, synthetic construct
  source 1..131: mol_type = other RNA
gttggaagactgagtgcccggttttagagctagaaatagcaagttaaaataaggctagtccgttatcaacttgaaaaagtggcaccgagtcggtgccgcgctccagcggtcggggcctggcgcactcagtc

SEQ ID NO: 283 - RNA, 128 nt, synthetic construct
  source 1..128: mol_type = other RNA
gttggaagactgagtgcccggttttagagctagaaatagcaagttaaaataaggctagtccgttatcaacttgaaaaagtggcaccgagtcggtgccgctccgcgtcccaataggtcggcactcagtc

SEQ ID NO: 284 - RNA, 141 nt, synthetic construct
  source 1..141: mol_type = other RNA
gttggaagactgagtgcccggttttagagctagaaatagcaagttaaaataaggctagtccgttatcaacttgaaaaagtggcaccgagtcggtgccgctggggcctcccgtcggggcctggcacgcgcgggcactcagtc

SEQ ID NO: 285 - RNA, 121 nt, synthetic construct
  source 1..121: mol_type = other RNA
gttggaagactgagtgcccggttttagagctagaaatagcaagttaaaataaggctagtccgttatcaacttgaaaaagtggcaccgagtcggtgccggacgtgctaccgggcactcagtc

SEQ ID NO: 286 - RNA, 116 nt, synthetic construct
  source 1..116: mol_type = other RNA
gttggaagactgagtgcccggttttagagctagaaatagcaagttaaaataaggctagtccgttatcaacttgaaaaagtggcaccgagtcggtgccggaggacgggcactcagtc

SEQ ID NO: 287 - RNA, 136 nt, synthetic construct
  source 1..136: mol_type = other RNA
gttggaagactgagtgcccggttttagagctagaaatagcaagttaaaataaggctagtccgttatcaacttgaaaaagtggcaccgagtcggtgccggcggatcgcgcccctggcgcggggccgagcactcagtc

SEQ ID NO: 288 - RNA, 126 nt, synthetic construct
  source 1..126: mol_type = other RNA
gttggaagactgagtgcccggttttagagctagaaatagcaagttaaaataaggctagtccgttatcaacttgaaaaagtggcaccgagtcggtgccgggccgccgatgtgcgcccgcactcagtc

SEQ ID NO: 289 - RNA, 124 nt, synthetic construct
  source 1..124: mol_type = other RNA
gttggaagactgagtgcccggttttagagctagaaatagcaagttaaaataaggctagtccgttatcaacttgaaaaagtggcaccgagtcggtgccgggcggcgggagcgggcgcactcagtc

SEQ ID NO: 290 - RNA, 124 nt, synthetic construct
  source 1..124: mol_type = other RNA
gttggaagactgagtgcccggttttagagctagaaatagcaagttaaaataaggctagtccgttatcaacttgaaaaagtggcaccgagtcggtgccggtccgcaccgcaagaagcactcagtc

SEQ ID NO: 291 - RNA, 146 nt, synthetic construct
  source 1..146: mol_type = other RNA
gttggaagactgagtgcccggttttagagctagaaatagcaagttaaaataaggctagtccgttatcaacttgaaaaagtggcaccgagtcggtgccgtcgcccggacggggcccggcccacgcgcgagtctgccggcactcagtc

SEQ ID NO: 292 - RNA, 141 nt, synthetic construct
  source 1..141: mol_type = other RNA
gttggaagactgagtgcccggttttagagctagaaatagcaagttaaaataaggctagtccgttatcaacttgaaaaagtggcaccgagtcggtgccgtgcccgcagccggttggagtgtgagcgggaggcgcactcagtc

SEQ ID NO: 293 - RNA, 131 nt, synthetic construct
  source 1..131: mol_type = other RNA
gttggaagactgagtgcccggttttagagctagaaatagcaagttaaaataaggctagtccgttatcaacttgaaaaagtggcaccgagtcggtgccgtggccgtaggtccggttcggcccgcactcagtc

SEQ ID NO: 294 - RNA, 126 nt, synthetic construct
  source 1..126: mol_type = other RNA
gttggaagactgagtgcccggttttagagctagaaatagcaagttaaaataaggctagtccgttatcaacttgaaaaagtggcaccgagtcggtgcctaccctcctccgcgacggggcactcagtc

SEQ ID NO: 295 - RNA, 126 nt, synthetic construct
  source 1..126: mol_type = other RNA
gttggaagactgagtgcccggttttagagctagaaatagcaagttaaaataaggctagtccgttatcaacttgaaaaagtggcaccgagtcggtgcctagcgtggcaggtctgcatgcactcagtc

SEQ ID NO: 296 - RNA, 131 nt, synthetic construct
  source 1..131: mol_type = other RNA
gttggaagactgagtgcccggttttagagctagaaatagcaagttaaaataaggctagtccgttatcaacttgaaaaagtggcaccgagtcggtgcctagcttcgatcgctacggagccgggcactcagtc

SEQ ID NO: 297 - RNA, 124 nt, synthetic construct
  source 1..124: mol_type = other RNA
gttggaagactgagtgcccggttttagagctagaaatagcaagttaaaataaggctagtccgttatcaacttgaaaaagtggcaccgagtcggtgcctatccggtccgagcgtcgcactcagtc

SEQ ID NO: 298 - RNA, 131 nt, synthetic construct
  source 1..131: mol_type = other RNA
gttggaagactgagtgcccggttttagagctagaaatagcaagttaaaataaggctagtccgttatcaacttgaaaaagtggcaccgagtcggtgcctcacgggtccccgagcccgctgccgcactcagtc

SEQ ID NO: 299 - RNA, 126 nt, synthetic construct
  source 1..126: mol_type = other RNA
gttggaagactgagtgcccggttttagagctagaaatagcaagttaaaataaggctagtccgttatcaacttgaaaaagtggcaccgagtcggtgcctccgccctagtgtagtcccgcactcagtc

SEQ ID NO: 300 - RNA, 121 nt, synthetic construct
  source 1..121: mol_type = other RNA
gttggaagactgagtgcccggttttagagctagaaatagcaagttaaaataaggctagtccgttatcaacttgaaaaagtggcaccgagtcggtgcctcgagtcggaccacgcactcagtc

SEQ ID NO: 301 - RNA, 136 nt, synthetic construct
  source 1..136: mol_type = other RNA
gttggaagactgagtgcccggttttagagctagaaatagcaagttaaaataaggctagtccgttatcaacttgaaaaagtggcaccgagtcggtgcctcgctctaagatttagccgctgaaagagcgcactcagtc

SEQ ID NO: 302 - RNA, 116 nt, synthetic construct
  source 1..116: mol_type = other RNA
gttggaagactgagtgcccggttttagagctagaaatagcaagttaaaataaggctagtccgttatcaacttgaaaaagtggcaccgagtcggtgcctgacactgggcactcagtc

SEQ ID NO: 303 - RNA, 136 nt, synthetic construct
  source 1..136: mol_type = other RNA
gttggaagactgagtgcccggttttagagctagaaatagcaagttaaaataaggctagtccgttatcaacttgaaaaagtggcaccgagtcggtgcctgagcggcgaaggcatcccggcctccgtcgcactcagtc

SEQ ID NO: 304 - RNA, 126 nt, synthetic construct
  source 1..126: mol_type = other RNA
gttggaagactgagtgcccggttttagagctagaaatagcaagttaaaataaggctagtccgttatcaacttgaaaaagtggcaccgagtcggtgcctgcccctgagggacgatccgcactcagtc

SEQ ID NO: 305 - RNA, 116 nt, synthetic construct
  source 1..116: mol_type = other RNA
gttggaagactgagtgcccggttttagagctagaaatagcaagttaaaataaggctagtccgttatcaacttgaaaaagtggcaccgagtcggtgcctgcggcaccgcactcagtc

SEQ ID NO: 306 - RNA, 126 nt, synthetic construct
  source 1..126: mol_type = other RNA
gttggaagactgagtgcccggttttagagctagaaatagcaagttaaaataaggctagtccgttatcaacttgaaaaagtggcaccgagtcggtgcgaaacttaaagatgataagggcactcagtc

SEQ ID NO: 307 - RNA, 128 nt, synthetic construct
  source 1..128: mol_type = other RNA
gttggaagactgagtgcccggttttagagctagaaatagcaagttaaaataaggctagtccgttatcaacttgaaaaagtggcaccgagtcggtgcgaaagtcgctgcgcgcggaccggcactcagtc

SEQ ID NO: 308 - RNA, 124 nt, synthetic construct
  source 1..124: mol_type = other RNA
gttggaagactgagtgcccggttttagagctagaaatagcaagttaaaataaggctagtccgttatcaacttgaaaaagtggcaccgagtcggtgcgaacactccggccgtagcgcactcagtc

SEQ ID NO: 309 - RNA, 116 nt, synthetic construct
  source 1..116: mol_type = other RNA
gttggaagactgagtgcccggttttagagctagaaatagcaagttaaaataaggctagtccgttatcaacttgaaaaagtggcaccgagtcggtgcgaagcggaaagcactcagtc

SEQ ID NO: 310 - RNA, 121 nt, synthetic construct
  source 1..121: mol_type = other RNA
gttggaagactgagtgcccggttttagagctagaaatagcaagttaaaataaggctagtccgttatcaacttgaaaaagtggcaccgagtcggtgcgacacgcgcggcacggcactcagtc

SEQ ID NO: 311 - RNA, 141 nt, synthetic construct
  source 1..141: mol_type = other RNA
gttggaagactgagtgcccggttttagagctagaaatagcaagttaaaataaggctagtccgttatcaacttgaaaaagtggcaccgagtcggtgcgaccgccgtagagtacaatgactcacgcggctcgagcactcagtc

SEQ ID NO: 312 - RNA, 121 nt, synthetic construct
  source 1..121: mol_type = other RNA
gttggaagactgagtgcccggttttagagctagaaatagcaagttaaaataaggctagtccgttatcaacttgaaaaagtggcaccgagtcggtgcgagcccagcatagcagcactcagtc

SEQ ID NO: 313 - RNA, 131 nt, synthetic construct
  source 1..131: mol_type = other RNA
gttggaagactgagtgcccggttttagagctagaaatagcaagttaaaataaggctagtccgttatcaacttgaaaaagtggcaccgagtcggtgcgagggcggttagagtgccattaccggcactcagtc

SEQ ID NO: 314 - RNA, 126 nt, synthetic construct
  source 1..126: mol_type = other RNA
gttggaagactgagtgcccggttttagagctagaaatagcaagttaaaataaggctagtccgttatcaacttgaaaaagtggcaccgagtcggtgcgatctaagaactgtctccgcgcactcagtc

SEQ ID NO: 315 - RNA, 121 nt, synthetic construct
  source 1..121: mol_type = other RNA
gttggaagactgagtgcccggttttagagctagaaatagcaagttaaaataaggctagtccgttatcaacttgaaaaagtggcaccgagtcggtgcgcacacaacgacgtcgcactcagtc

SEQ ID NO: 316 - RNA, 134 nt, synthetic construct
  source 1..134: mol_type = other RNA
gttggaagactgagtgcccggttttagagctagaaatagcaagttaaaataaggctagtccgttatcaacttgaaaaagtggcaccgagtcggtgcgcaccgaagcgcggtccaatggacatccgcactcagtc

SEQ ID NO: 317 - RNA, 134 nt, synthetic construct
  source 1..134: mol_type = other RNA
gttggaagactgagtgcccggttttagagctagaaatagcaagttaaaataaggctagtccgttatcaacttgaaaaagtggcaccgagtcggtgcgcacggggcacgtcccgggacgtagccggcactcagtc

SEQ ID NO: 318 - RNA, 116 nt, synthetic construct
  source 1..116: mol_type = other RNA
gttggaagactgagtgcccggttttagagctagaaatagcaagttaaaataaggctagtccgttatcaacttgaaaaagtggcaccgagtcggtgcgcagtgctaggcactcagtc

SEQ ID NO: 319 - RNA, 121 nt, synthetic construct
  source 1..121: mol_type = other RNA
gttggaagactgagtgcccggttttagagctagaaatagcaagttaaaataaggctagtccgttatcaacttgaaaaagtggcaccgagtcggtgcgccacgaggctcagggcactcagtc

SEQ ID NO: 320 - RNA, 116 nt, synthetic construct
  source 1..116: mol_type = other RNA
gttggaagactgagtgcccggttttagagctagaaatagcaagttaaaataaggctagtccgttatcaacttgaaaaagtggcaccgagtcggtgcgccagcgcgggcactcagtc

SEQ ID NO: 321 - RNA, 136 nt, synthetic construct
  source 1..136: mol_type = other RNA
gttggaagactgagtgcccggttttagagctagaaatagcaagttaaaataaggctagtccgttatcaacttgaaaaagtggcaccgagtcggtgcgcccacccgtccggcggacggcctcctgcagcactcagtc

SEQ ID NO: 322 - RNA, 126 nt, synthetic construct
  source 1..126: mol_type = other RNA
gttggaagactgagtgcccggttttagagctagaaatagcaagttaaaataaggctagtccgttatcaacttgaaaaagtggcaccgagtcggtgcgccccacgggccgagtgcgggcactcagtc

SEQ ID NO: 323 - RNA, 136 nt, synthetic construct
  source 1..136: mol_type = other RNA
gttggaagactgagtgcccggttttagagctagaaatagcaagttaaaataaggctagtccgttatcaacttgaaaaagtggcaccgagtcggtgcgccccgcagcggcacggcctgtggcgccgggcactcagtc

SEQ ID NO: 324 - RNA, 128 nt, synthetic construct
  source 1..128: mol_type = other RNA
gttggaagactgagtgcccggttttagagctagaaatagcaagttaaaataaggctagtccgttatcaacttgaaaaagtggcaccgagtcggtgcgccccgggcgactggcactcgcgcactcagtc

SEQ ID NO: 325 - RNA, 116 nt, synthetic construct
  source 1..116: mol_type = other RNA
gttggaagactgagtgcccggttttagagctagaaatagcaagttaaaataaggctagtccgttatcaacttgaaaaagtggcaccgagtcggtgcgcccctacaagcactcagtc

SEQ ID NO: 326 - RNA, 134 nt, synthetic construct
  source 1..134: mol_type = other RNA
gttggaagactgagtgcccggttttagagctagaaatagcaagttaaaataaggctagtccgttatcaacttgaaaaagtggcaccgagtcggtgcgcccgctcagcctccccggcccggggcggcactcagtc

SEQ ID NO: 327 - RNA, 121 nt, synthetic construct
  source 1..121: mol_type = other RNA
gttggaagactgagtgcccggttttagagctagaaatagcaagttaaaataaggctagtccgttatcaacttgaaaaagtggcaccgagtcggtgcgccctgtccgtagtggcactcagtc

SEQ ID NO: 328 - RNA, 128 nt, synthetic construct
  source 1..128: mol_type = other RNA
gttggaagactgagtgcccggttttagagctagaaatagcaagttaaaataaggctagtccgttatcaacttgaaaaagtggcaccgagtcggtgcgccgactcagtgctgctctgaggcactcagtc

SEQ ID NO: 329 - RNA, 128 nt, synthetic construct
  source 1..128: mol_type = other RNA
gttggaagactgagtgcccggttttagagctagaaatagcaagttaaaataaggctagtccgttatcaacttgaaaaagtggcaccgagtcggtgcgccgcccgcctccgcggcgcgggcactcagtc

SEQ ID NO: 330 - RNA, 121 nt, synthetic construct
  source 1..121: mol_type = other RNA
gttggaagactgagtgcccggttttagagctagaaatagcaagttaaaataaggctagtccgttatcaacttgaaaaagtggcaccgagtcggtgcgccgccctggcctcggcactcagtc

SEQ ID NO: 331 - RNA, 136 nt, synthetic construct
  source 1..136: mol_type = other RNA
gttggaagactgagtgcccggttttagagctagaaatagcaagttaaaataaggctagtccgttatcaacttgaaaaagtggcaccgagtcggtgcgccggccgcaccgggccgcgacgcccggccgcactcagtc

SEQ ID NO: 332 - RNA, 124 nt, synthetic construct
  source 1..124: mol_type = other RNA
gttggaagactgagtgcccggttttagagctagaaatagcaagttaaaataaggctagtccgttatcaacttgaaaaagtggcaccgagtcggtgcgccgtaacctccgcgcgggcactcagtc

SEQ ID NO: 333 - RNA, 116 nt, synthetic construct
  source 1..116: mol_type = other RNA
gttggaagactgagtgcccggttttagagctagaaatagcaagttaaaataaggctagtccgttatcaacttgaaaaagtggcaccgagtcggtgcgcctaggctggcactcagtc

SEQ ID NO: 334 - RNA, 128 nt, synthetic construct
  source 1..128: mol_type = other RNA
gttggaagactgagtgcccggttttagagctagaaatagcaagttaaaataaggctagtccgttatcaacttgaaaaagtggcaccgagtcggtgcgcctcgcgggcggcccgggtcagcactcagtc

SEQ ID NO: 335 - RNA, 126 nt, synthetic construct
  source 1..126: mol_type = other RNA
gttggaagactgagtgcccggttttagagctagaaatagcaagttaaaataaggctagtccgttatcaacttgaaaaagtggcaccgagtcggtgcgcctggccgggcctcaccgagcactcagtc

SEQ ID NO: 336 - RNA, 136 nt, synthetic construct
  source 1..136: mol_type = other RNA
gttggaagactgagtgcccggttttagagctagaaatagcaagttaaaataaggctagtccgttatcaacttgaaaaagtggcaccgagtcggtgcgccttactcgaccgccacgacctcgtccaggcactcagtc

SEQ ID NO: 337 - RNA, 141 nt, synthetic construct
  source 1..141: mol_type = other RNA
gttggaagactgagtgcccggttttagagctagaaatagcaagttaaaataaggctagtccgttatcaacttgaaaaagtggcaccgagtcggtgcgcgaaccgacgtcacggctcggggtactgaggactgcactcagtc

SEQ ID NO: 338 - RNA, 134 nt, synthetic construct
  source 1..134: mol_type = other RNA
gttggaagactgagtgcccggttttagagctagaaatagcaagttaaaataaggctagtccgttatcaacttgaaaaagtggcaccgagtcggtgcgcgcaccggagcggaggcagggccggccgcactcagtc

SEQ ID NO: 339 - RNA, 141 nt, synthetic construct
  source 1..141: mol_type = other RNA
gttggaagactgagtgcccggttttagagctagaaatagcaagttaaaataaggctagtccgttatcaacttgaaaaagtggcaccgagtcggtgcgcgcccagaagtggggaagccgctgccaagagagcgcactcagtc

SEQ ID NO: 340 - RNA, 146 nt, synthetic construct
  source 1..146: mol_type = other RNA
gttggaagactgagtgcccggttttagagctagaaatagcaagttaaaataaggctagtccgttatcaacttgaaaaagtggcaccgagtcggtgcgcgccggcgcgccaggcgcggcccggccgtgcccgcgcgggcactcagtc

SEQ ID NO: 341 - RNA, 128 nt, synthetic construct
  source 1..128: mol_type = other RNA
gttggaagactgagtgcccggttttagagctagaaatagcaagttaaaataaggctagtccgttatcaacttgaaaaagtggcaccgagtcggtgcgcgccgttgcggccgcgcccgtgcactcagtc

SEQ ID NO: 342 - RNA, 136 nt, synthetic construct
  source 1..136: mol_type = other RNA
gttggaagactgagtgcccggttttagagctagaaatagcaagttaaaataaggctagtccgttatcaacttgaaaaagtggcaccgagtcggtgcgcgcgaacctgggatcgccatgcatgataggcactcagtc

SEQ ID NO: 343 - RNA, 146 nt, synthetic construct
  source 1..146: mol_type = other RNA
gttggaagactgagtgcccggttttagagctagaaatagcaagttaaaataaggctagtccgttatcaacttgaaaaagtggcaccgagtcggtgcgcgcgcgggcattgggcgcgggccggcgcgggctggggcggcactcagtc

SEQ ID NO: 344 - RNA, 124 nt, synthetic construct
  source 1..124: mol_type = other RNA
gttggaagactgagtgcccggttttagagctagaaatagcaagttaaaataaggctagtccgttatcaacttgaaaaagtggcaccgagtcggtgcgcggccgtcccggggctggcactcagtc

SEQ ID NO: 345 - RNA, 146 nt, synthetic construct
  source 1..146: mol_type = other RNA
gttggaagactgagtgcccggttttagagctagaaatagcaagttaaaataaggctagtccgttatcaacttgaaaaagtggcaccgagtcggtgcgcggggcccggcgagtttggcagcgcgacgagcctcgcgggcactcagtc

SEQ ID NO: 346 - RNA, 128 nt, synthetic construct
  source 1..128: mol_type = other RNA
gttggaagactgagtgcccggttttagagctagaaatagcaagttaaaataaggctagtccgttatcaacttgaaaaagtggcaccgagtcggtgcgcggtatcacctacgacatcaagcactcagtc

SEQ ID NO: 347 - RNA, 121 nt, synthetic construct
  source 1..121: mol_type = other RNA
gttggaagactgagtgcccggttttagagctagaaatagcaagttaaaataaggctagtccgttatcaacttgaaaaagtggcaccgagtcggtgcgcggtgggcggaggcgcactcagtc

SEQ ID NO: 348 - RNA, 131 nt, synthetic construct
  source 1..131: mol_type = other RNA
gttggaagactgagtgcccggttttagagctagaaatagcaagttaaaataaggctagtccgttatcaacttgaaaaagtggcaccgagtcggtgcgcgtcgcccgccggcagcggacgcggcactcagtc

SEQ ID NO: 349 - RNA, 128 nt, synthetic construct
  source 1..128: mol_type = other RNA
gttggaagactgagtgcccggttttagagctagaaatagcaagttaaaataaggctagtccgttatcaacttgaaaaagtggcaccgagtcggtgcgctacgggttcgcctgagcaatgcactcagtc

SEQ ID NO: 350 - RNA, 124 nt, synthetic construct
  source 1..124: mol_type = other RNA
gttggaagactgagtgcccggttttagagctagaaatagcaagttaaaataaggctagtccgttatcaacttgaaaaagtggcaccgagtcggtgcgctccccagtggccgcccgcactcagtc

SEQ ID NO: 351 - RNA, 126 nt, synthetic construct
  source 1..126: mol_type = other RNA
gttggaagactgagtgcccggttttagagctagaaatagcaagttaaaataaggctagtccgttatcaacttgaaaaagtggcaccgagtcggtgcgctgggcgacggccggcgcggcactcagtc

SEQ ID NO: 352 - RNA, 134 nt, synthetic construct
  source 1..134: mol_type = other RNA
gttggaagactgagtgcccggttttagagctagaaatagcaagttaaaataaggctagtccgttatcaacttgaaaaagtggcaccgagtcggtgcgctgtgggtcgcagtcacgcgggccgtcgcactcagtc

SEQ ID NO: 353 - RNA, 121 nt, synthetic construct
  source 1..121: mol_type = other RNA
gttggaagactgagtgcccggttttagagctagaaatagcaagttaaaataaggctagtccgttatcaacttgaaaaagtggcaccgagtcggtgcggacattcttgccgcgcactcagtc

SEQ ID NO: 354 - RNA, 128 nt, synthetic construct
  source 1..128: mol_type = other RNA
gttggaagactgagtgcccggttttagagctagaaatagcaagttaaaataaggctagtccgttatcaacttgaaaaagtggcaccgagtcggtgcggaccagtgtccgtggcgagatgcactcagtc

SEQ ID NO: 355 - RNA, 124 nt, synthetic construct
  source 1..124: mol_type = other RNA
gttggaagactgagtgcccggttttagagctagaaatagcaagttaaaataaggctagtccgttatcaacttgaaaaagtggcaccgagtcggtgcggacgcggacgccgggtagcactcagtc

SEQ ID NO: 356 - RNA, 134 nt, synthetic construct
  source 1..134: mol_type = other RNA
gttggaagactgagtgcccggttttagagctagaaatagcaagttaaaataaggctagtccgttatcaacttgaaaaagtggcaccgagtcggtgcggagagatcacgctcgatacgaggggaggcactcagtc

SEQ ID NO: 357 - RNA, 144 nt, synthetic construct
  source 1..144: mol_type = other RNA
gttggaagactgagtgcccggttttagagctagaaatagcaagttaaaataaggctagtccgttatcaacttgaaaaagtggcaccgagtcggtgcggatgaggccgaggcaggcagcatcggaccatcatgcagcactcagtc

SEQ ID NO: 358 - RNA, 141 nt, synthetic construct
  source 1..141: mol_type = other RNA
gttggaagactgagtgcccggttttagagctagaaatagcaagttaaaataaggctagtccgttatcaacttgaaaaagtggcaccgagtcggtgcggatggctaattatctgtttacccgtcacaaatcagcactcagtc

SEQ ID NO: 359 - RNA, 131 nt, synthetic construct
  source 1..131: mol_type = other RNA
gttggaagactgagtgcccggttttagagctagaaatagcaagttaaaataaggctagtccgttatcaacttgaaaaagtggcaccgagtcggtgcggcaacgggacgtccccggggcggcgcactcagtc

SEQ ID NO: 360 - RNA, 121 nt, synthetic construct
  source 1..121: mol_type = other RNA
gttggaagactgagtgcccggttttagagctagaaatagcaagttaaaataaggctagtccgttatcaacttgaaaaagtggcaccgagtcggtgcggcaattaaccatacgcactcagtc

SEQ ID NO: 361 - RNA, 136 nt, synthetic construct
  source 1..136: mol_type = other RNA
gttggaagactgagtgcccggttttagagctagaaatagcaagttaaaataaggctagtccgttatcaacttgaaaaagtggcaccgagtcggtgcggcccaggcccgggctcccaggccggcgccgcactcagtc

SEQ ID NO: 362 - RNA, 131 nt, synthetic construct
  source 1..131: mol_type = other RNA
gttggaagactgagtgcccggttttagagctagaaatagcaagttaaaataaggctagtccgttatcaacttgaaaaagtggcaccgagtcggtgcggccgcagaccgaagcggtgcagtggcactcagtc

SEQ ID NO: 363 - RNA, 126 nt, synthetic construct
  source 1..126: mol_type = other RNA
gttggaagactgagtgcccggttttagagctagaaatagcaagttaaaataaggctagtccgttatcaacttgaaaaagtggcaccgagtcggtgcggccggacggggcggcgggggcactcagtc

SEQ ID NO: 364 - RNA, 124 nt, synthetic construct
  source 1..124: mol_type = other RNA
gttggaagactgagtgcccggttttagagctagaaatagcaagttaaaataaggctagtccgttatcaacttgaaaaagtggcaccgagtcggtgcggcctggacgccaggcctgcactcagtc

SEQ ID NO: 365 - RNA, 134 nt, synthetic construct
  source 1..134: mol_type = other RNA
gttggaagactgagtgcccggttttagagctagaaatagcaagttaaaataaggctagtccgttatcaacttgaaaaagtggcaccgagtcggtgcggcctgtggctacgggcggcgggcagcagcactcagtc

SEQ ID NO: 366 - RNA, 131 nt, synthetic construct
  source 1..131: mol_type = other RNA
gttggaagactgagtgcccggttttagagctagaaatagcaagttaaaataaggctagtccgttatcaacttgaaaaagtggcaccgagtcggtgcggcgaggcagccccaaggccccggggcactcagtc

SEQ ID NO: 367 - RNA, 128 nt, synthetic construct
  source 1..128: mol_type = other RNA
gttggaagactgagtgcccggttttagagctagaaatagcaagttaaaataaggctagtccgttatcaacttgaaaaagtggcaccgagtcggtgcggcgcgggcgggccgggatcgggcactcagtc

SEQ ID NO: 368 - RNA, 141 nt, synthetic construct
  source 1..141: mol_type = other RNA
gttggaagactgagtgcccggttttagagctagaaatagcaagttaaaataaggctagtccgttatcaacttgaaaaagtggcaccgagtcggtgcgggccaagccgcaggtaccggagaacccggtggcggcactcagtc

SEQ ID NO: 369 - RNA, 116 nt, synthetic construct
  source 1..116: mol_type = other RNA
gttggaagactgagtgcccggttttagagctagaaatagcaagttaaaataaggctagtccgttatcaacttgaaaaagtggcaccgagtcggtgcgggcctagctgcactcagtc

SEQ ID NO: 370 - RNA, 126 nt, synthetic construct
  source 1..126: mol_type = other RNA
gttggaagactgagtgcccggttttagagctagaaatagcaagttaaaataaggctagtccgttatcaacttgaaaaagtggcaccgagtcggtgcgggcgtcggacccatcgacggcactcagtc

SEQ ID NO: 371 - RNA, 128 nt, synthetic construct
  source 1..128: mol_type = other RNA
gttggaagactgagtgcccggttttagagctagaaatagcaagttaaaataaggctagtccgttatcaacttgaaaaagtggcaccgagtcggtgcggggcccggcctcaggggccgggcactcagtc

SEQ ID NO: 372 - RNA, 134 nt, synthetic construct
  source 1..134: mol_type = other RNA
gttggaagactgagtgcccggttttagagctagaaatagcaagttaaaataaggctagtccgttatcaacttgaaaaagtggcaccgagtcggtgcggggcggcgccggcggccggctcccgcggcactcagtc

SEQ ID NO: 373 - RNA, 129 nt, synthetic construct
  source 1..129: mol_type = other RNA
gttggaagactgagtgcccggttttagagctagaaatagcaagttaaaataaggctagtccgttatcaacttgaaaaagtggcaccgagtcggtgcgggtctgatgcccgagaccacgagcactcagtc

SEQ ID NO: 374 - RNA, 136 nt, synthetic construct
  source 1..136: mol_type = other RNA
gttggaagactgagtgcccggttttagagctagaaatagcaagttaaaataaggctagtccgttatcaacttgaaaaagtggcaccgagtcggtgcggtaacgtaatacaaggaaacatgagacacgcactcagtc

SEQ ID NO: 375 - RNA, 136 nt, synthetic construct
  source 1..136: mol_type = other RNA
gttggaagactgagtgcccggttttagagctagaaatagcaagttaaaataaggctagtccgttatcaacttgaaaaagtggcaccgagtcggtgcggtactacgtaagcagataaggtaaacactgcactcagtc

SEQ ID NO: 376 - RNA, 141 nt, synthetic construct
  source 1..141: mol_type = other RNA
gttggaagactgagtgcccggttttagagctagaaatagcaagttaaaataaggctagtccgttatcaacttgaaaaagtggcaccgagtcggtgcggtccattggcactaggggcgttcagtatcatatcgcactcagtc

SEQ ID NO: 377 - RNA, 146 nt, synthetic construct
  source 1..146: mol_type = other RNA
gttggaagactgagtgcccggttttagagctagaaatagcaagttaaaataaggctagtccgttatcaacttgaaaaagtggcaccgagtcggtgcggtcctggtgacgacggggtgagagcgaacttaaggccgcgcactcagtc

SEQ ID NO: 378 - RNA, 141 nt, synthetic construct
  source 1..141: mol_type = other RNA
gttggaagactgagtgcccggttttagagctagaaatagcaagttaaaataaggctagtccgttatcaacttgaaaaagtggcaccgagtcggtgcgtacgagccgggccgccggggaagccgttccccgggcactcagtc

SEQ ID NO: 379 - RNA, 116 nt, synthetic construct
  source 1..116: mol_type = other RNA
gttggaagactgagtgcccggttttagagctagaaatagcaagttaaaataaggctagtccgttatcaacttgaaaaagtggcaccgagtcggtgcgtacggcttcgcactcagtc

SEQ ID NO: 380 - RNA, 126 nt, synthetic construct
  source 1..126: mol_type = other RNA
gttggaagactgagtgcccggttttagagctagaaatagcaagttaaaataaggctagtccgttatcaacttgaaaaagtggcaccgagtcggtgcgtatcggggtaatgcatatagcactcagtc

SEQ ID NO: 381 - RNA, 121 nt, synthetic construct
  source 1..121: mol_type = other RNA
gttggaagactgagtgcccggttttagagctagaaatagcaagttaaaataaggctagtccgttatcaacttgaaaaagtggcaccgagtcggtgcgtcacctacgcgcctgcactcagtc

SEQ ID NO: 382 - RNA, 131 nt, synthetic construct
  source 1..131: mol_type = other RNA
gttggaagactgagtgcccggttttagagctagaaatagcaagttaaaataaggctagtccgttatcaacttgaaaaagtggcaccgagtcggtgcgtcgctgatttcggtgcgagcctccgcactcagtc

SEQ ID NO: 383 - RNA, 141 nt, synthetic construct
  source 1..141: mol_type = other RNA
gttggaagactgagtgcccggttttagagctagaaatagcaagttaaaataaggctagtccgttatcaacttgaaaaagtggcaccgagtcggtgcgtcggcctgcacgccggccacgcccggggcgccgagcactcagtc

SEQ ID NO: 384 - RNA, 134 nt, synthetic construct
  source 1..134: mol_type = other RNA
gttggaagactgagtgcccggttttagagctagaaatagcaagttaaaataaggctagtccgttatcaacttgaaaaagtggcaccgagtcggtgcgtgaagtcggcgtgaccgagggcacggggcactcagtc

SEQ ID NO: 385 - RNA, 136 nt, synthetic construct
  source 1..136: mol_type = other RNA
gttggaagactgagtgcccggttttagagctagaaatagcaagttaaaataaggctagtccgttatcaacttgaaaaagtggcaccgagtcggtgcgtgcgccgggccccgcgccccagcctcccggcactcagtc

SEQ ID NO: 386 - RNA, 131 nt, synthetic construct
  source 1..131: mol_type = other RNA
gttggaagactgagtgcccggttttagagctagaaatagcaagttaaaataaggctagtccgttatcaacttgaaaaagtggcaccgagtcggtgcgtggtgacggaggctcccacggcccgcactcagtc

SEQ ID NO: 387 - RNA, 121 nt, synthetic construct
  source 1..121: mol_type = other RNA
gttggaagactgagtgcccggttttagagctagaaatagcaagttaaaataaggctagtccgttatcaacttgaaaaagtggcaccgagtcggtgcgttacacaagtagctgcactcagtc

SEQ ID NO: 388 - RNA, 128 nt, synthetic construct
  source 1..128: mol_type = other RNA
gttggaagactgagtgcccggttttagagctagaaatagcaagttaaaataaggctagtccgttatcaacttgaaaaagtggcaccgagtcggtgcgttcgcgggtgggcgttacggggcactcagtc

SEQ ID NO: 389 - RNA, 128 nt, synthetic construct
  source 1..128: mol_type = other RNA
gttggaagactgagtgcccggttttagagctagaaatagcaagttaaaataaggctagtccgttatcaacttgaaaaagtggcaccgagtcggtgcgtttcacatggcctggactcatgcactcagtc

SEQ ID NO: 390 - RNA, 136 nt, synthetic construct
  source 1..136: mol_type = other RNA
gttggaagactgagtgcccggttttagagctagaaatagcaagttaaaataaggctagtccgttatcaacttgaaaaagtggcaccgagtcggtgctaactgctctatatacgagattatcaaatcgcactcagtc

SEQ ID NO: 391 - RNA, 124 nt, synthetic construct
  source 1..124: mol_type = other RNA
gttggaagactgagtgcccggttttagagctagaaatagcaagttaaaataaggctagtccgttatcaacttgaaaaagtggcaccgagtcggtgctaagtcaaatgagactttgcactcagtc

SEQ ID NO: 392 - RNA, 124 nt, synthetic construct
  source 1..124: mol_type = other RNA
gttggaagactgagtgcccggttttagagctagaaatagcaagttaaaataaggctagtccgttatcaacttgaaaaagtggcaccgagtcggtgctacccggccgctccggcggcactcagtc

SEQ ID NO: 393 - RNA, 146 nt, synthetic construct
  source 1..146: mol_type = other RNA
gttggaagactgagtgcccggttttagagctagaaatagcaagttaaaataaggctagtccgttatcaacttgaaaaagtggcaccgagtcggtgctacttcttgaatgtaattaccaaatacgttagctatggaagcactcagtc

SEQ ID NO: 394 - RNA, 141 nt, synthetic construct
  source 1..141: mol_type = other RNA
gttggaagactgagtgcccggttttagagctagaaatagcaagttaaaataaggctagtccgttatcaacttgaaaaagtggcaccgagtcggtgctagatcaatttccgagatcactgtcatctcaagctgcactcagtc

SEQ ID NO: 395 - RNA, 134 nt, synthetic construct
  source 1..134: mol_type = other RNA
gttggaagactgagtgcccggttttagagctagaaatagcaagttaaaataaggctagtccgttatcaacttgaaaaagtggcaccgagtcggtgctagcactctatcgcataagtcattctaggcactcagtc

SEQ ID NO: 396 - RNA, 128 nt, synthetic construct
  source 1..128: mol_type = other RNA
gttggaagactgagtgcccggttttagagctagaaatagcaagttaaaataaggctagtccgttatcaacttgaaaaagtggcaccgagtcggtgctatctaacaatgaagttgcacagcactcagtc

SEQ ID NO: 397 - RNA, 141 nt, synthetic construct
  source 1..141: mol_type = other RNA
gttggaagactgagtgcccggttttagagctagaaatagcaagttaaaataaggctagtccgttatcaacttgaaaaagtggcaccgagtcggtgctcaaacatgaattcttcacgttgttaaagattatcgcactcagtc

SEQ ID NO: 398 - RNA, 136 nt, synthetic construct
  source 1..136: mol_type = other RNA
gttggaagactgagtgcccggttttagagctagaaatagcaagttaaaataaggctagtccgttatcaacttgaaaaagtggcaccgagtcggtgctccaaggccaccccgcgggtaccggaatccgcactcagtc

SEQ ID NO: 399 - RNA, 141 nt, synthetic construct
  source 1..141: mol_type = other RNA
gttggaagactgagtgcccggttttagagctagaaatagcaagttaaaataaggctagtccgttatcaacttgaaaaagtggcaccgagtcggtgctcccctcccggcacgccgcgcggctcgccagaacggcactcagtc

SEQ ID NO: 400 - RNA, 146 nt, synthetic construct
  source 1..146: mol_type = other RNA
gttggaagactgagtgcccggttttagagctagaaatagcaagttaaaataaggctagtccgttatcaacttgaaaaagtggcaccgagtcggtgctccctgtccgccacctggcgctgctggcgtggacatgtgcgcactcagtc

SEQ ID NO: 401 - RNA, 128 nt, synthetic construct
  source 1..128: mol_type = other RNA
gttggaagactgagtgcccggttttagagctagaaatagcaagttaaaataaggctagtccgttatcaacttgaaaaagtggcaccgagtcggtgctcctaacagcggacgacccacggcactcagtc

SEQ ID NO: 402 - RNA, 136 nt, synthetic construct
  source 1..136: mol_type = other RNA
gttggaagactgagtgcccggttttagagctagaaatagcaagttaaaataaggctagtccgttatcaacttgaaaaagtggcaccgagtcggtgctcgacggtatcggcccagcctgcgagccgggcactcagtc

SEQ ID NO: 403 - RNA, 126 nt, synthetic construct
  source 1..126: mol_type = other RNA
gttggaagactgagtgcccggttttagagctagaaatagcaagttaaaataaggctagtccgttatcaacttgaaaaagtggcaccgagtcggtgctcggacaccctagacctcgggcactcagtc

SEQ ID NO: 404 - RNA, 124 nt, synthetic construct
  source 1..124: mol_type = other RNA
gttggaagactgagtgcccggttttagagctagaaatagcaagttaaaataaggctagtccgttatcaacttgaaaaagtggcaccgagtcggtgctcggccggtcttccgcctgcactcagtc

SEQ ID NO: 405 - RNA, 131 nt, synthetic construct
  source 1..131: mol_type = other RNA
gttggaagactgagtgcccggttttagagctagaaatagcaagttaaaataaggctagtccgttatcaacttgaaaaagtggcaccgagtcggtgctcggcggccgggctcaggcgccggggcactcagtc

SEQ ID NO: 406 - RNA, 121 nt, synthetic construct
  source 1..121: mol_type = other RNA
gttggaagactgagtgcccggttttagagctagaaatagcaagttaaaataaggctagtccgttatcaacttgaaaaagtggcaccgagtcggtgctcgtgttcaatccgcgcactcagtc

SEQ ID NO: 407 - RNA, 134 nt, synthetic construct
  source 1..134: mol_type = other RNA
gttggaagactgagtgcccggttttagagctagaaatagcaagttaaaataaggctagtccgttatcaacttgaaaaagtggcaccgagtcggtgctctgcaacgatggaatcaacacactatagcactcagtc

SEQ ID NO: 408 - RNA, 124 nt, synthetic construct
  source 1..124: mol_type = other RNA
gttggaagactgagtgcccggttttagagctagaaatagcaagttaaaataaggctagtccgttatcaacttgaaaaagtggcaccgagtcggtgctctgccctcctcttgggtgcactcagtc

SEQ ID NO: 409 - RNA, 131 nt, synthetic construct
  source 1..131: mol_type = other RNA
gttggaagactgagtgcccggttttagagctagaaatagcaagttaaaataaggctagtccgttatcaacttgaaaaagtggcaccgagtcggtgctcttgtgaatggaattgaggagcttgcactcagtc

SEQ ID NO: 410 - RNA, 131 nt, synthetic construct
  source 1..131: mol_type = other RNA
gttggaagactgagtgcccggttttagagctagaaatagcaagttaaaataaggctagtccgttatcaacttgaaaaagtggcaccgagtcggtgctgataggtaaggtgtaattactttcgcactcagtc

SEQ ID NO: 411 - RNA, 121 nt, synthetic construct
  source 1..121: mol_type = other RNA
gttggaagactgagtgcccggttttagagctagaaatagcaagttaaaataaggctagtccgttatcaacttgaaaaagtggcaccgagtcggtgctgcacgcggggccgagcactcagtc

SEQ ID NO: 412 - RNA, 131 nt, synthetic construct
  source 1..131: mol_type = other RNA
gttggaagactgagtgcccggttttagagctagaaatagcaagttaaaataaggctagtccgttatcaacttgaaaaagtggcaccgagtcggtgctgcacgggtacactgaagccctacggcactcagtc

SEQ ID NO: 413 - RNA, 121 nt, synthetic construct
  source 1..121: mol_type = other RNA
gttggaagactgagtgcccggttttagagctagaaatagcaagttaaaataaggctagtccgttatcaacttgaaaaagtggcaccgagtcggtgctgccgcacggcggctgcactcagtc

SEQ ID NO: 414 - RNA, 126 nt, synthetic construct
  source 1..126: mol_type = other RNA
gttggaagactgagtgcccggttttagagctagaaatagcaagttaaaataaggctagtccgttatcaacttgaaaaagtggcaccgagtcggtgctgcgggcggccgtgtatagggcactcagtc

SEQ ID NO: 415 - RNA, 121 nt, synthetic construct
  source 1..121: mol_type = other RNA
gttggaagactgagtgcccggttttagagctagaaatagcaagttaaaataaggctagtccgttatcaacttgaaaaagtggcaccgagtcggtgctgcgggtcaccgagggcactcagtc

SEQ ID NO: 416 - RNA, 131 nt, synthetic construct
  source 1..131: mol_type = other RNA
gttggaagactgagtgcccggttttagagctagaaatagcaagttaaaataaggctagtccgttatcaacttgaaaaagtggcaccgagtcggtgctgcgtattcctagatagctccacacgcactcagtc

SEQ ID NO: 417 - RNA, 128 nt, synthetic construct
  source 1..128: mol_type = other RNA
gttggaagactgagtgcccggttttagagctagaaatagcaagttaaaataaggctagtccgttatcaacttgaaaaagtggcaccgagtcggtgctggaaatgccgtggcgtggggcgcactcagtc

SEQ ID NO: 418 - RNA, 136 nt, synthetic construct
  source 1..136: mol_type = other RNA
gttggaagactgagtgcccggttttagagctagaaatagcaagttaaaataaggctagtccgttatcaacttgaaaaagtggcaccgagtcggtgctggaccgccacaggcttggccctagctcgcgcactcagtc

SEQ ID NO: 419 - RNA, 124 nt, synthetic construct
  source 1..124: mol_type = other RNA
gttggaagactgagtgcccggttttagagctagaaatagcaagttaaaataaggctagtccgttatcaacttgaaaaagtggcaccgagtcggtgctggggtacttatgtcgtcgcactcagtc

SEQ ID NO: 420 - RNA, 126 nt, synthetic construct
  source 1..126: mol_type = other RNA
gttggaagactgagtgcccggttttagagctagaaatagcaagttaaaataaggctagtccgttatcaacttgaaaaagtggcaccgagtcggtgctggtacggccggattccggggcactcagtc

SEQ ID NO: 421 - RNA, 131 nt, synthetic construct
  source 1..131: mol_type = other RNA
gttggaagactgagtgcccggttttagagctagaaatagcaagttaaaataaggctagtccgttatcaacttgaaaaagtggcaccgagtcggtgctggtagtttccggtttcggcctcgggcactcagtc

SEQ ID NO: 422 - RNA, 116 nt, synthetic construct
  source 1..116: mol_type = other RNA
gttggaagactgagtgcccggttttagagctagaaatagcaagttaaaataaggctagtccgttatcaacttgaaaaagtggcaccgagtcggtgctgtccgccgggcactcagtc

SEQ ID NO: 423 - RNA, 126 nt, synthetic construct
  source 1..126: mol_type = other RNA
gttggaagactgagtgcccggttttagagctagaaatagcaagttaaaataaggctagtccgttatcaacttgaaaaagtggcaccgagtcggtgctgtggcccgcgctccggcacgcactcagtc

SEQ ID NO: 424 - RNA, 141 nt, synthetic construct
  source 1..141: mol_type = other RNA
gttggaagactgagtgcccggttttagagctagaaatagcaagttaaaataaggctagtccgttatcaacttgaaaaagtggcaccgagtcggtgctgtgggacgttacattgagtattgagcgcgcacgtgcactcagtc

SEQ ID NO: 425 - RNA, 141 nt, synthetic construct
  source 1..141: mol_type = other RNA
gttggaagactgagtgcccggttttagagctagaaatagcaagttaaaataaggctagtccgttatcaacttgaaaaagtggcaccgagtcggtgctgttgacttaacgccatgacctggtgctgtcaccagcactcagtc

SEQ ID NO: 426 - RNA, 131 nt, synthetic construct
  source 1..131: mol_type = other RNA
gttggaagactgagtgcccggttttagagctagaaatagcaagttaaaataaggctagtccgttatcaacttgaaaaagtggcaccgagtcggtgcttaaaggggacaataacgcttaagggcactcagtc

SEQ ID NO: 427 - RNA, 134 nt, synthetic construct
  source 1..134: mol_type = other RNA
gttggaagactgagtgcccggttttagagctagaaatagcaagttaaaataaggctagtccgttatcaacttgaaaaagtggcaccgagtcggtgcttacctattaccaagggctacatcttaggcactcagtc

SEQ ID NO: 428 - RNA, 144 nt, synthetic construct
  source 1..144: mol_type = other RNA
gttggaagactgagtgcccggttttagagctagaaatagcaagttaaaataaggctagtccgttatcaacttgaaaaagtggcaccgagtcggtgcttcgcccgggcccgtagagaaggctcggcgtgcggcaagcactcagtc

SEQ ID NO: 429 - RNA, 124 nt, synthetic construct
  source 1..124: mol_type = other RNA
gttggaagactgagtgcccggttttagagctagaaatagcaagttaaaataaggctagtccgttatcaacttgaaaaagtggcaccgagtcggtgcttctacgccggtttctgagcactcagtc

SEQ ID NO: 430 - RNA, 141 nt, synthetic construct
  source 1..141: mol_type = other RNA
gttggaagactgagtgcccggttttagagctagaaatagcaagttaaaataaggctagtccgttatcaacttgaaaaagtggcaccgagtcggtgcttctcaaagagactttgttaagggtaccgctgatagcactcagtc

SEQ ID NO: 431 - RNA, 131 nt, synthetic construct
  source 1..131: mol_type = other RNA
gttggaagactgagtgcccggttttagagctagaaatagcaagttaaaataaggctagtccgttatcaacttgaaaaagtggcaccgagtcggtgcttgcggtggtgtcgggtgcggcccggcactcagtc

SEQ ID NO: 432 - RNA, 124 nt, synthetic construct
  source 1..124: mol_type = other RNA
gttggaagactgagtgcccggttttagagctagaaatagcaagttaaaataaggctagtccgttatcaacttgaaaaagtggcaccgagtcggtgcttgctctctgccatgtacgcactcagtc

SEQ ID NO: 433 - RNA, 128 nt, synthetic construct
  source 1..128: mol_type = other RNA
gttggaagactgagtgcccggttttagagctagaaatagcaagttaaaataaggctagtccgttatcaacttgaaaaagtggcaccgagtcggtgcttggagtttgctctgtgtatgagcactcagtc

SEQ ID NO: 434 - RNA, 126 nt, synthetic construct
  source 1..126: mol_type = other RNA
gttggaagactgagtgcccggttttagagctagaaatagcaagttaaaataaggctagtccgttatcaacttgaaaaagtggcaccgagtcggtgctttacactagatggtgctgtgcactcagtc

SEQ ID NO: 435 - RNA, 128 nt, synthetic construct
  source 1..128: mol_type = other RNA
gttggaagactgagtgcccggttttagagctagaaatagcaagttaaaataaggctagtccgttatcaacttgaaaaagtggcaccgagtcggtgctttccggcgcgcagatcgggcagcactcagtc

SEQ ID NO: 436 - RNA, 126 nt, synthetic construct
  source 1..126: mol_type = other RNA
gttggaagactgagtgcccggttttagagctagaaatagcaagttaaaataaggctagtccgttatcaacttgaaaaagtggcaccgagtcggtgcaaaggggacaccggggtcccgcactcagtc

SEQ ID NO: 437 - RNA, 136 nt, synthetic construct
  source 1..136: mol_type = other RNA
gttggaagactgagtgcccggttttagagctagaaatagcaagttaaaataaggctagtccgttatcaacttgaaaaagtggcaccgagtcggtgcaacccgcagagggacgggtcgttcgccctcgcactcagtc

SEQ ID NO: 438 - RNA, 121 nt, synthetic construct
  source 1..121: mol_type = other RNA
gttggaagactgagtgcccggttttagagctagaaatagcaagttaaaataaggctagtccgttatcaacttgaaaaagtggcaccgagtcggtgcacgaccgagggtcctgcactcagtc

SEQ ID NO: 439 - RNA, 126 nt, synthetic construct
  source 1..126: mol_type = other RNA
gttggaagactgagtgcccggttttagagctagaaatagcaagttaaaataaggctagtccgttatcaacttgaaaaagtggcaccgagtcggtgcagctcagattatagtgagctgcactcagtc

SEQ ID NO: 440 - RNA, 121 nt, synthetic construct
  source 1..121: mol_type = other RNA
gttggaagactgagtgcccggttttagagctagaaatagcaagttaaaataaggctagtccgttatcaacttgaaaaagtggcaccgagtcggtgcaggtcactcccgaccgcactcagtc

SEQ ID NO: 441 - RNA, 126 nt, synthetic construct
  source 1..126: mol_type = other RNA
gttggaagactgagtgcccggttttagagctagaaatagcaagttaaaataaggctagtccgttatcaacttgaaaaagtggcaccgagtcggtgcaggtggctacaattgccacagcactcagtc

SEQ ID NO: 442 - RNA, 126 nt, synthetic construct
  source 1..126: mol_type = other RNA
gttggaagactgagtgcccggttttagagctagaaatagcaagttaaaataaggctagtccgttatcaacttgaaaaagtggcaccgagtcggtgcagtagctgtacccaactaaagcactcagtc

SEQ ID NO: 443 - RNA, 131 nt, synthetic construct
  source 1..131: mol_type = other RNA
gttggaagactgagtgcccggttttagagctagaaatagcaagttaaaataaggctagtccgttatcaacttgaaaaagtggcaccgagtcggtgcccgagcggccacgaggatcggggcggcactcagtc

SEQ ID NO: 444 - RNA, 131 nt, synthetic construct
  source 1..131: mol_type = other RNA
gttggaagactgagtgcccggttttagagctagaaatagcaagttaaaataaggctagtccgttatcaacttgaaaaagtggcaccgagtcggtgccgaaggaggggttcctcgcggagcggcactcagtc

SEQ ID NO: 445 - RNA, 131 nt, synthetic construct
  source 1..131: mol_type = other RNA
gttggaagactgagtgcccggttttagagctagaaatagcaagttaaaataaggctagtccgttatcaacttgaaaaagtggcaccgagtcggtgccgaagtggtgtagctgacatcgcgcgcactcagtc

SEQ ID NO: 446 - RNA, 121 nt, synthetic construct
  source 1..121: mol_type = other RNA
gttggaagactgagtgcccggttttagagctagaaatagcaagttaaaataaggctagtccgttatcaacttgaaaaagtggcaccgagtcggtgccgggccaccgcccttgcactcagtc

SEQ ID NO: 447 - RNA, 131 nt, synthetic construct
  source 1..131: mol_type = other RNA
gttggaagactgagtgcccggttttagagctagaaatagcaagttaaaataaggctagtccgttatcaacttgaaaaagtggcaccgagtcggtgccttagggtctcagtaacccacttcagcactcagtc

SEQ ID NO: 448 - RNA, 126 nt, synthetic construct
  source 1..126: mol_type = other RNA
gttggaagactgagtgcccggttttagagctagaaatagcaagttaaaataaggctagtccgttatcaacttgaaaaagtggcaccgagtcggtgccttggacggaaatcgcctatgcactcagtc

SEQ ID NO: 449 - RNA, 131 nt, synthetic construct
  source 1..131: mol_type = other RNA
gttggaagactgagtgcccggttttagagctagaaatagcaagttaaaataaggctagtccgttatcaacttgaaaaagtggcaccgagtcggtgcgcaaggtgtttgtgcaccttaccttgcactcagtc

SEQ ID NO: 450 - RNA, 126 nt, synthetic construct
  source 1..126: mol_type = other RNA
gttggaagactgagtgcccggttttagagctagaaatagcaagttaaaataaggctagtccgttatcaacttgaaaaagtggcaccgagtcggtgcgccggcggaagccggctggtgcactcagtc

SEQ ID NO: 451 - RNA, 131 nt, synthetic construct
  source 1..131: mol_type = other RNA
gttggaagactgagtgcccggttttagagctagaaatagcaagttaaaataaggctagtccgttatcaacttgaaaaagtggcaccgagtcggtgcggaagcggagactctatgcttcgccgcactcagtc

SEQ ID NO: 452 - RNA, 136 nt, synthetic construct
  source 1..136: mol_type = other RNA
gttggaagactgagtgcccggttttagagctagaaatagcaagttaaaataaggctagtccgttatcaacttgaaaaagtggcaccgagtcggtgcggagaccgagcgtgtgcgacgctcctgtcggcactcagtc

SEQ ID NO: 453 - RNA, 136 nt, synthetic construct
  source 1..136: mol_type = other RNA
gttggaagactgagtgcccggttttagagctagaaatagcaagttaaaataaggctagtccgttatcaacttgaaaaagtggcaccgagtcggtgcggcgccgaaggtcccaggtggaccgggcccgcactcagtc

SEQ ID NO: 454 - RNA, 121 nt, synthetic construct
  source 1..121: mol_type = other RNA
gttggaagactgagtgcccggttttagagctagaaatagcaagttaaaataaggctagtccgttatcaacttgaaaaagtggcaccgagtcggtgcgggccggtgggccaagcactcagtc

SEQ ID NO: 455 - RNA, 131 nt, synthetic construct
  source 1..131: mol_type = other RNA
gttggaagactgagtgcccggttttagagctagaaatagcaagttaaaataaggctagtccgttatcaacttgaaaaagtggcaccgagtcggtgcgggtgcggcgcaagggccgcctcgtgcactcagtc

SEQ ID NO: 456 - RNA, 126 nt, synthetic construct
  source 1..126: mol_type = other RNA
gttggaagactgagtgcccggttttagagctagaaatagcaagttaaaataaggctagtccgttatcaacttgaaaaagtggcaccgagtcggtgcggtccaggcaagacgctgatgcactcagtc

SEQ ID NO: 457 - RNA, 126 nt, synthetic construct
  source 1..126: mol_type = other RNA
gttggaagactgagtgcccggttttagagctagaaatagcaagttaaaataaggctagtccgttatcaacttgaaaaagtggcaccgagtcggtgcgtcgcgctgttccgcgagctgcactcagtc

SEQ ID NO: 458 - RNA, 136 nt, synthetic construct
  source 1..136: mol_type = other RNA
gttggaagactgagtgcccggttttagagctagaaatagcaagttaaaataaggctagtccgttatcaacttgaaaaagtggcaccgagtcggtgcgtgatccaagtgctcgacactcccacgggtgcactcagtc

SEQ ID NO: 459 - RNA, 126 nt, synthetic construct
  source 1..126: mol_type = other RNA
gttggaagactgagtgcccggttttagagctagaaatagcaagttaaaataaggctagtccgttatcaacttgaaaaagtggcaccgagtcggtgcgttggtgtgcactacgacaagcactcagtc

SEQ ID NO: 460 - RNA, 131 nt, synthetic construct
  source 1..131: mol_type = other RNA
gttggaagactgagtgcccggttttagagctagaaatagcaagttaaaataaggctagtccgttatcaacttgaaaaagtggcaccgagtcggtgctaaaggatcacatataggtcgtggtgcactcagtc

SEQ ID NO: 461 - RNA, 131 nt, synthetic construct
  source 1..131: mol_type = other RNA
gttggaagactgagtgcccggttttagagctagaaatagcaagttaaaataaggctagtccgttatcaacttgaaaaagtggcaccgagtcggtgctagggaagagtcgaatatatctctcgcactcagtc

SEQ ID NO: 462 - RNA, 136 nt, synthetic construct
  source 1..136: mol_type = other RNA
gttggaagactgagtgcccggttttagagctagaaatagcaagttaaaataaggctagtccgttatcaacttgaaaaagtggcaccgagtcggtgctctgcacaagagatattctgttctccatgtgcactcagtc

SEQ ID NO: 463 - RNA, 121 nt, synthetic construct
  source 1..121: mol_type = other RNA
gttggaagactgagtgcccggttttagagctagaaatagcaagttaaaataaggctagtccgttatcaacttgaaaaagtggcaccgagtcggtgctgtagctatggatcagcactcagtc

SEQ ID NO: 464 - RNA, 136 nt, synthetic construct
  source 1..136: mol_type = other RNA
gttggaagactgagtgcccggttttagagctagaaatagcaagttaaaataaggctagtccgttatcaacttgaaaaagtggcaccgagtcggtgctgtgcccgagggagaatcgaacacatgaatgcactcagtc

SEQ ID NO: 465 - RNA, 121 nt, synthetic construct
  source 1..121: mol_type = other RNA
gttggaagactgagtgcccggttttagagctagaaatagcaagttaaaataaggctagtccgttatcaacttgaaaaagtggcaccgagtcggtgcttaagtgagctgcttgcactcagtc

SEQ ID NO: 466 - RNA, 121 nt, synthetic construct
  source 1..121: mol_type = other RNA
gttggaagactgagtgcccggttttagagctagaaatagcaagttaaaataaggctagtccgttatcaacttgaaaaagtggcaccgagtcggtgcttgagcgatgcatatgcactcagtc

SEQ ID NO: 467 - RNA, 121 nt, synthetic construct
  source 1..121: mol_type = other RNA
gttggaagactgagtgcccggttttagagctagaaatagcaagttaaaataaggctagtccgttatcaacttgaaaaagtggcaccgagtcggtgcttgccccattggcatgcactcagtc

SEQ ID NO: 468 - RNA, 121 nt, synthetic construct
  source 1..121: mol_type = other RNA
gttggaagactgagtgcccggttttagagctagaaatagcaagttaaaataaggctagtccgttatcaacttgaaaaagtggcaccgagtcggtgcttgccctatcggcgtgcactcagtc

SEQ ID NO: 469 - RNA, 126 nt, synthetic construct
  source 1..126: mol_type = other RNA
gttggaagactgagtgcccggttttagagctagaaatagcaagttaaaataaggctagtccgttatcaacttgaaaaagtggcaccgagtcggtgcaataaatatccaaaccgccggcactcagtc

SEQ ID NO: 470 - RNA, 122 nt, synthetic construct
  source 1..122: mol_type = other RNA
gttggaagactgagtgcccggttttagagctagaaatagcaagttaaaataaggctagtccgttatcaacttgaaaaagtggcaccgagtcggtgcaatatccaaaccgccggcactcagtc

SEQ ID NO: 471 - RNA, 118 nt, synthetic construct
  source 1..118: mol_type = other RNA
gttggaagactgagtgcccggttttagagctagaaatagcaagttaaaataaggctagtccgttatcaacttgaaaaagtggcaccgagtcggtgcacgctccccagagcactcagtc

SEQ ID NO: 472 - RNA, 120 nt, synthetic construct
  source 1..120: mol_type = other RNA
gttggaagactgagtgcccggttttagagctagaaatagcaagttaaaataaggctagtccgttatcaacttgaaaaagtggcaccgagtcggtgcagacgctccccagagcactcagtc

SEQ ID NO: 473 - RNA, 122 nt, synthetic construct
  source 1..122: mol_type = other RNA
gttggaagactgagtgcccggttttagagctagaaatagcaagttaaaataaggctagtccgttatcaacttgaaaaagtggcaccgagtcggtgcatccccgaaaaagcgggcactcagtc

SEQ ID NO: 474 - RNA, 122 nt, synthetic construct
  source 1..122: mol_type = other RNA
gttggaagactgagtgcccggttttagagctagaaatagcaagttaaaataaggctagtccgttatcaacttgaaaaagtggcaccgagtcggtgcccagacgctccccagagcactcagtc

SEQ ID NO: 475 - RNA, 120 nt, synthetic construct
  source 1..120: mol_type = other RNA
gttggaagactgagtgcccggttttagagctagaaatagcaagttaaaataaggctagtccgttatcaacttgaaaaagtggcaccgagtcggtgcccccgaaaaagcgggcactcagtc

SEQ ID NO: 476 - RNA, 118 nt, synthetic construct
  source 1..118: mol_type = other RNA
gttggaagactgagtgcccggttttagagctagaaatagcaagttaaaataaggctagtccgttatcaacttgaaaaagtggcaccgagtcggtgcccgaaaaagcgggcactcagtc

SEQ ID NO: 477 - RNA, 124 nt, synthetic construct
  source 1..124: mol_type = other RNA
gttggaagactgagtgcccggttttagagctagaaatagcaagttaaaataaggctagtccgttatcaacttgaaaaagtggcaccgagtcggtgccgccagacgctccccagagcactcagtc

SEQ ID NO: 478 - RNA, 126 nt, synthetic construct
  source 1..126: mol_type = other RNA
gttggaagactgagtgcccggttttagagctagaaatagcaagttaaaataaggctagtccgttatcaacttgaaaaagtggcaccgagtcggtgccgcgccagacgctccccagagcactcagtc

SEQ ID NO: 479 - RNA, 126 nt, synthetic construct
  source 1..126: mol_type = other RNA
gttggaagactgagtgcccggttttagagctagaaatagcaagttaaaataaggctagtccgttatcaacttgaaaaagtggcaccgagtcggtgccgggatccccgaaaaagcgggcactcagtc

SEQ ID NO: 480 - RNA, 124 nt, synthetic construct
  source 1..124: mol_type = other RNA
gttggaagactgagtgcccggttttagagctagaaatagcaagttaaaataaggctagtccgttatcaacttgaaaaagtggcaccgagtcggtgcggatccccgaaaaagcgggcactcagtc

SEQ ID NO: 481 - RNA, 124 nt, synthetic construct
  source 1..124: mol_type = other RNA
gttggaagactgagtgcccggttttagagctagaaatagcaagttaaaataaggctagtccgttatcaacttgaaaaagtggcaccgagtcggtgctaaatatccaaaccgccggcactcagtc

SEQ ID NO: 482 - RNA, 120 nt, synthetic construct
  source 1..120: mol_type = other RNA
gttggaagactgagtgcccggttttagagctagaaatagcaagttaaaataaggctagtccgttatcaacttgaaaaagtggcaccgagtcggtgctatccaaaccgccggcactcagtc

SEQ ID NO: 483 - RNA, 118 nt, synthetic construct
  source 1..118: mol_type = other RNA
gttggaagactgagtgcccggttttagagctagaaatagcaagttaaaataaggctagtccgttatcaacttgaaaaagtggcaccgagtcggtgctccaaaccgccggcactcagtc

SEQ ID NO: 484 - RNA, 20 nt, synthetic construct
  source 1..20: mol_type = other RNA
tagaactgtcttcgactccg

SEQ ID NO: 485 - RNA, 17 nt, synthetic construct
  source 1..17: mol_type = other RNA
agtcgaagacagttcta

SEQ ID NO: 486 - RNA, 16 nt, synthetic construct
  source 1..16: mol_type = other RNA
agtcgaagacagttct

SEQ ID NO: 487 - RNA, 15 nt, synthetic construct
  source 1..15: mol_type = other RNA
agtcgaagacagttc

SEQ ID NO: 488 - RNA, 14 nt, synthetic construct
  source 1..14: mol_type = other RNA
agtcgaagacagtt

SEQ ID NO: 489 - RNA, 13 nt, synthetic construct
  source 1..13: mol_type = other RNA
agtcgaagacagt

SEQ ID NO: 490 - RNA, 12 nt, synthetic construct
  source 1..12: mol_type = other RNA
agtcgaagacag

SEQ ID NO: 491 - RNA, 11 nt, synthetic construct
  source 1..11: mol_type = other RNA
agtcgaagaca

SEQ ID NO: 492 - RNA, 10 nt, synthetic construct
  source 1..10: mol_type = other RNA
agtcgaagac

SEQ ID NO: 493-499 - skipped (7 entries)

SEQ ID NO: 500 - RNA, 142 nt, synthetic construct
  source 1..142: mol_type = other RNA
tagaactgtcttcgactccggttttagagctagaaatagcaagttaaaataaggctagtccgttatcaacttgaaaaagtggcaccgagtcggtgcggcttgtcgacgacggcggtctccgtcgtcaggatcatagtcgaag

SEQ ID NO: 501 - RNA, 144 nt, synthetic construct
  source 1..144: mol_type = other RNA
tagaactgtcttcgactccggttttagagctagaaatagcaagttaaaataaggctagtccgttatcaacttgaaaaagtggcaccgagtcggtgcggcttgtcgacgacggcggtctccgtcgtcaggatcatagtcgaagac

SEQ ID NO: 502 - RNA, 146 nt, synthetic construct
  source 1..146: mol_type = other RNA
tagaactgtcttcgactccggttttagagctagaaatagcaagttaaaataaggctagtccgttatcaacttgaaaaagtggcaccgagtcggtgcggcttgtcgacgacggcggtctccgtcgtcaggatcatagtcgaagacag

SEQ ID NO: 503 - RNA, 124 nt, synthetic construct
  source 1..124: mol_type = other RNA
tagaactgtcttcgactccggttttagagctagaaatagcaagttaaaataaggctagtccgttatcaacttgaaaaagtggcaccgagtcggtgcaataaatatccaaaccgccgagtcgaag

SEQ ID NO: 504 - RNA, 126 nt, synthetic construct
  source 1..126: mol_type = other RNA
tagaactgtcttcgactccggttttagagctagaaatagcaagttaaaataaggctagtccgttatcaacttgaaaaagtggcaccgagtcggtgcaataaatatccaaaccgccgagtcgaagac

SEQ ID NO: 505 - RNA, 128 nt, synthetic construct
  source 1..128: mol_type = other RNA
tagaactgtcttcgactccggttttagagctagaaatagcaagttaaaataaggctagtccgttatcaacttgaaaaagtggcaccgagtcggtgcaataaatatccaaaccgccgagtcgaagacag

SEQ ID NO: 506 - RNA, 130 nt, synthetic construct
  source 1..130: mol_type = other RNA
tagaactgtcttcgactccggttttagagctagaaatagcaagttaaaataaggctagtccgttatcaacttgaaaaagtggcaccgagtcggtgcaataaatatccaaaccgccgagtcgaagacagtt

SEQ ID NO: 507 - RNA, 133 nt, synthetic construct
  source 1..133: mol_type = other RNA
tagaactgtcttcgactccggttttagagctagaaatagcaagttaaaataaggctagtccgttatcaacttgaaaaagtggcaccgagtcggtgcaataaatatccaaaccgccgagtcgaagacagttcta

SEQ ID NO: 508 - RNA, 129 nt, synthetic construct
  source 1..129: mol_type = other RNA
tagaactgtcttcgactccggttttagagctagaaatagcaagttaaaataaggctagtccgttatcaacttgaaaaagtggcaccgagtcggtgcaggtcaataaatatccaaaccgccgagtcgaag

SEQ ID NO: 509 - RNA, 131 nt, synthetic construct
  source 1..131: mol_type = other RNA
tagaactgtcttcgactccggttttagagctagaaatagcaagttaaaataaggctagtccgttatcaacttgaaaaagtggcaccgagtcggtgcaggtcaataaatatccaaaccgccgagtcgaagac

SEQ ID NO: 510 - RNA, 133 nt, synthetic construct
  source 1..133: mol_type = other RNA
tagaactgtcttcgactccggttttagagctagaaatagcaagttaaaataaggctagtccgttatcaacttgaaaaagtggcaccgagtcggtgcaggtcaataaatatccaaaccgccgagtcgaagacag

SEQ ID NO: 511 - RNA, 135 nt, synthetic construct
  source 1..135: mol_type = other RNA
tagaactgtcttcgactccggttttagagctagaaatagcaagttaaaataaggctagtccgttatcaacttgaaaaagtggcaccgagtcggtgcaggtcaataaatatccaaaccgccgagtcgaagacagtt

SEQ ID NO: 512 - RNA, 138 nt, synthetic construct
  source 1..138: mol_type = other RNA
tagaactgtcttcgactccggttttagagctagaaatagcaagttaaaataaggctagtccgttatcaacttgaaaaagtggcaccgagtcggtgcaggtcaataaatatccaaaccgccgagtcgaagacagttcta

SEQ ID NO: 513 - RNA, 134 nt, synthetic construct
  source 1..134: mol_type = other RNA
tagaactgtcttcgactccggttttagagctagaaatagcaagttaaaataaggctagtccgttatcaacttgaaaaagtggcaccgagtcggtgcggacgaggtcaataaatatccaaaccgccgagtcgaag

SEQ ID NO: 514 - RNA, 136 nt, synthetic construct
  source 1..136: mol_type = other RNA
tagaactgtcttcgactccggttttagagctagaaatagcaagttaaaataaggctagtccgttatcaacttgaaaaagtggcaccgagtcggtgcggacgaggtcaataaatatccaaaccgccgagtcgaagac

SEQ ID NO: 515 - RNA, 138 nt, synthetic construct
  source 1..138: mol_type = other RNA
tagaactgtcttcgactccggttttagagctagaaatagcaagttaaaataaggctagtccgttatcaacttgaaaaagtggcaccgagtcggtgcggacgaggtcaataaatatccaaaccgccgagtcgaagacag

SEQ ID NO: 516 - RNA, 140 nt, synthetic construct
  source 1..140: mol_type = other RNA
tagaactgtcttcgactccggttttagagctagaaatagcaagttaaaataaggctagtccgttatcaacttgaaaaagtggcaccgagtcggtgcggacgaggtcaataaatatccaaaccgccgagtcgaagacagtt

SEQ ID NO: 517 - RNA, 143 nt, synthetic construct
  source 1..143: mol_type = other RNA
tagaactgtcttcgactccggttttagagctagaaatagcaagttaaaataaggctagtccgttatcaacttgaaaaagtggcaccgagtcggtgcggacgaggtcaataaatatccaaaccgccgagtcgaagacagttcta

SEQ ID NO: 518 - RNA, 20 nt, synthetic construct
  source 1..20: mol_type = other RNA
ctagaactgtcttcgactcc

SEQ ID NO: 519 - RNA, 17 nt, synthetic construct
  source 1..17: mol_type = other RNA
gtcgaagacagttctag

SEQ ID NO: 520 - RNA, 16 nt, synthetic construct
  source 1..16: mol_type = other RNA
gtcgaagacagttcta

SEQ ID NO: 521 - RNA, 15 nt, synthetic construct
  source 1..15: mol_type = other RNA
gtcgaagacagttct

SEQ ID NO: 522 - RNA, 14 nt, synthetic construct
  source 1..14: mol_type = other RNA
gtcgaagacagttc

SEQ ID NO: 523 - RNA, 13 nt, synthetic construct
  source 1..13: mol_type = other RNA
gtcgaagacagtt

SEQ ID NO: 524 - RNA, 12 nt, synthetic construct
  source 1..12: mol_type = other RNA
gtcgaagacagt

SEQ ID NO: 525 - RNA, 11 nt, synthetic construct
  source 1..11: mol_type = other RNA
gtcgaagacag

SEQ ID NO: 526 - RNA, 10 nt, synthetic construct
  source 1..10: mol_type = other RNA
gtcgaagaca

SEQ ID NO: 527-533 - skipped (7 entries)

SEQ ID NO: 534 - RNA, 144 nt, synthetic construct
  source 1..144: mol_type = other RNA
ctagaactgtcttcgactccgttttagagctagaaatagcaagttaaaataaggctagtccgttatcaacttgaaaaagtggcaccgagtcggtgcggcttgtcgacgacggcggtctccgtcgtcaggatcatgtcgaagaca

SEQ ID NO: 535 - RNA, 146 nt, synthetic construct
  source 1..146: mol_type = other RNA
ctagaactgtcttcgactccgttttagagctagaaatagcaagttaaaataaggctagtccgttatcaacttgaaaaagtggcaccgagtcggtgcggcttgtcgacgacggcggtctccgtcgtcaggatcatgtcgaagacagt

SEQ ID NO: 536 - RNA, 20 nt, synthetic construct
  source 1..20: mol_type = other RNA
cgttggaagactgagtgccc

SEQ ID NO: 537 - RNA, 17 nt, synthetic construct
  source 1..17: mol_type = other RNA
cactcagtcttccaacg

SEQ ID NO: 538 - RNA, 16 nt, synthetic construct
  source 1..16: mol_type = other RNA
cactcagtcttccaac

SEQ ID NO: 539 - RNA, 15 nt, synthetic construct
  source 1..15: mol_type = other RNA
cactcagtcttccaa

SEQ ID NO: 540 - RNA, 14 nt, synthetic construct
  source 1..14: mol_type = other RNA
cactcagtcttcca

SEQ ID NO: 541 - RNA, 13 nt, synthetic construct
  source 1..13: mol_type = other RNA
cactcagtcttcc

SEQ ID NO: 542 - RNA, 12 nt, synthetic construct
  source 1..12: mol_type = other RNA
cactcagtcttc

SEQ ID NO: 543 - RNA, 11 nt, synthetic construct
  source 1..11: mol_type = other RNA
cactcagtctt

SEQ ID NO: 544 - RNA, 10 nt, synthetic construct
  source 1..10: mol_type = other RNA
cactcagtct

SEQ ID NO: 545-551 - skipped (7 entries)

SEQ ID NO: 552 - RNA, 144 nt, synthetic construct
  source 1..144: mol_type = other RNA
cgttggaagactgagtgcccgttttagagctagaaatagcaagttaaaataaggctagtccgttatcaacttgaaaaagtggcaccgagtcggtgcggcttgtcgacgacggcggtctccgtcgtcaggatcatcactcagtct

SEQ ID NO: 553 - RNA, 147 nt, synthetic construct
  source 1..147: mol_type = other RNA
cgttggaagactgagtgcccgttttagagctagaaatagcaagttaaaataaggctagtccgttatcaacttgaaaaagtggcaccgagtcggtgcggcttgtcgacgacggcggtctccgtcgtcaggatcatcactcagtcttcc

SEQ ID NO: 554 - RNA, 20 nt, synthetic construct
  source 1..20: mol_type = other RNA
aagactgagtgcccggggca

SEQ ID NO: 555 - RNA, 17 nt, synthetic construct
  source 1..17: mol_type = other RNA
cccgggcactcagtctt

SEQ ID NO: 556 - RNA, 16 nt, synthetic construct
  source 1..16: mol_type = other RNA
cccgggcactcagtct

SEQ ID NO: 557 - RNA, 15 nt, synthetic construct
  source 1..15: mol_type = other RNA
cccgggcactcagtc

SEQ ID NO: 558 - RNA, 14 nt, synthetic construct
  source 1..14: mol_type = other RNA
cccgggcactcagt

SEQ ID NO: 559 - RNA, 13 nt, synthetic construct
  source 1..13: mol_type = other RNA
cccgggcactcag

SEQ ID NO: 560 - RNA, 12 nt, synthetic construct
  source 1..12: mol_type = other RNA
cccgggcactca

SEQ ID NO: 561 - RNA, 11 nt, synthetic construct
  source 1..11: mol_type = other RNA
cccgggcactc

SEQ ID NO: 562 - RNA, 10 nt, synthetic construct
  source 1..10: mol_type = other RNA
cccgggcact

SEQ ID NO: 563-569 - skipped (7 entries)

SEQ ID NO: 570 - RNA, 144 nt, synthetic construct
  source 1..144: mol_type = other RNA
aagactgagtgcccggggcagttttagagctagaaatagcaagttaaaataaggctagtccgttatcaacttgaaaaagtggcaccgagtcggtgcggcttgtcgacgacggcggtctccgtcgtcaggatcatcccgggcact

SEQ ID NO: 571 - RNA, 146 nt, synthetic construct
  source 1..146: mol_type = other RNA
aagactgagtgcccggggcagttttagagctagaaatagcaagttaaaataaggctagtccgttatcaacttgaaaaagtggcaccgagtcggtgcggcttgtcgacgacggcggtctccgtcgtcaggatcatcccgggcactca

SEQ ID NO: 572 - RNA, 20 nt, synthetic construct
  source 1..20: mol_type = other RNA
gttcacaaccgctccgagcg

SEQ ID NO: 573 - RNA, 17 nt, synthetic construct
  source 1..17: mol_type = other RNA
tcggagcggttgtgaac

SEQ ID NO: 574 - RNA, 16 nt, synthetic construct
  source 1..16: mol_type = other RNA
tcggagcggttgtgaa

SEQ ID NO: 575 - RNA, 15 nt, synthetic construct
  source 1..15: mol_type = other RNA
tcggagcggttgtga

SEQ ID NO: 576 - RNA, 14 nt, synthetic construct
  source 1..14: mol_type = other RNA
tcggagcggttgtg

SEQ ID NO: 577 - RNA, 13 nt, synthetic construct
  source 1..13: mol_type = other RNA
tcggagcggttgt

SEQ ID NO: 578 - RNA, 12 nt, synthetic construct
  source 1..12: mol_type = other RNA
tcggagcggttg

SEQ ID NO: 579 - RNA, 11 nt, synthetic construct
  source 1..11: mol_type = other RNA
tcggagcggtt

SEQ ID NO: 580 - RNA, 10 nt, synthetic construct
  source 1..10: mol_type = other RNA
tcggagcggt

SEQ ID NO: 581-587 - skipped (7 entries)

SEQ ID NO: 588 - RNA, 144 nt, synthetic construct
  source 1..144: mol_type = other RNA
gttcacaaccgctccgagcggttttagagctagaaatagcaagttaaaataaggctagtccgttatcaacttgaaaaagtggcaccgagtcggtgcggcttgtcgacgacggcggtctccgtcgtcaggatcattcggagcggt

SEQ ID NO: 589 - RNA, 147 nt, synthetic construct
  source 1..147: mol_type = other RNA
gttcacaaccgctccgagcggttttagagctagaaatagcaagttaaaataaggctagtccgttatcaacttgaaaaagtggcaccgagtcggtgcggcttgtcgacgacggcggtctccgtcgtcaggatcattcggagcggttgt

SEQ ID NO: 590 - RNA, 20 nt, synthetic construct
  source 1..20: mol_type = other RNA
cagctccagtcctgtgatcc

SEQ ID NO: 591 - RNA, 17 nt, synthetic construct
  source 1..17: mol_type = other RNA
tcacaggactggagctg

SEQ ID NO: 592 - RNA, 16 nt, synthetic construct
  source 1..16: mol_type = other RNA
tcacaggactggagct

SEQ ID NO: 593 - RNA, 15 nt, synthetic construct
  source 1..15: mol_type = other RNA
tcacaggactggagc

SEQ ID NO: 594 - RNA, 14 nt, synthetic construct
  source 1..14: mol_type = other RNA
tcacaggactggag

SEQ ID NO: 595 - RNA, 13 nt, synthetic construct
  source 1..13: mol_type = other RNA
tcacaggactgga

SEQ ID NO: 596 - RNA, 12 nt, synthetic construct
  source 1..12: mol_type = other RNA
tcacaggactgg

SEQ ID NO: 597 - RNA, 11 nt, synthetic construct
  source 1..11: mol_type = other RNA
tcacaggactg

SEQ ID NO: 598 - RNA, 10 nt, synthetic construct
  source 1..10: mol_type = other RNA
tcacaggact

SEQ ID NO: 599-605 - skipped (7 entries)

SEQ ID NO: 606 - RNA, 144 nt, synthetic construct
  source 1..144: mol_type = other RNA
cagctccagtcctgtgatccgttttagagctagaaatagcaagttaaaataaggctagtccgttatcaacttgaaaaagtggcaccgagtcggtgcggcttgtcgacgacggcggtctccgtcgtcaggatcattcacaggact

SEQ ID NO: 607 - RNA, 146 nt, synthetic construct
  source 1..146: mol_type = other RNA
cagctccagtcctgtgatccgttttagagctagaaatagcaagttaaaataaggctagtccgttatcaacttgaaaaagtggcaccgagtcggtgcggcttgtcgacgacggcggtctccgtcgtcaggatcattcacaggactgg

SEQ ID NO: 608 - RNA, 141 nt, synthetic construct
  source 1..141: mol_type = other RNA
cagctccagtcctgtgatccgttttagagctagaaatagcaagttaaaataaggctagtccgttatcaacttgaaaaagtggcaccgagtcggtgcgcgaaccgacgtcacggctcggggtactgaggacttcacaggact

SEQ ID NO: 609 - RNA, 136 nt, synthetic construct
  source 1..136: mol_type = other RNA
cagctccagtcctgtgatccgttttagagctagaaatagcaagttaaaataaggctagtccgttatcaacttgaaaaagtggcaccgagtcggtgcggtactacgtaagcagataaggtaaacacttcacaggact

SEQ ID NO: 610 - RNA, 146 nt, synthetic construct
  source 1..146: mol_type = other RNA
cagctccagtcctgtgatccgttttagagctagaaatagcaagttaaaataaggctagtccgttatcaacttgaaaaagtggcaccgagtcggtgcatactgccggccgagagtaaaggacaggtcattagggtattcacaggact

SEQ ID NO: 611 - RNA, 134 nt, synthetic construct
  source 1..134: mol_type = other RNA
cagctccagtcctgtgatccgttttagagctagaaatagcaagttaaaataaggctagtccgttatcaacttgaaaaagtggcaccgagtcggtgccgagcttacccgtggggaagcaagggattcacaggact

SEQ ID NO: 612 - RNA, 128 nt, synthetic construct
  source 1..128: mol_type = other RNA
cagctccagtcctgtgatccgttttagagctagaaatagcaagttaaaataaggctagtccgttatcaacttgaaaaagtggcaccgagtcggtgcggaccagtgtccgtggcgagattcacaggact

SEQ ID NO: 613 - RNA, 128 nt, synthetic construct
  source 1..128: mol_type = other RNA
cagctccagtcctgtgatccgttttagagctagaaatagcaagttaaaataaggctagtccgttatcaacttgaaaaagtggcaccgagtcggtgcgtttcacatggcctggactcattcacaggact

SEQ ID NO: 614 - RNA, 134 nt, synthetic construct
  source 1..134: mol_type = other RNA
cagctccagtcctgtgatccgttttagagctagaaatagcaagttaaaataaggctagtccgttatcaacttgaaaaagtggcaccgagtcggtgccagacggtggcgcactcatgccacgctttcacaggact

SEQ ID NO: 615 - RNA, 126 nt, synthetic construct
  source 1..126: mol_type = other RNA
cagctccagtcctgtgatccgttttagagctagaaatagcaagttaaaataaggctagtccgttatcaacttgaaaaagtggcaccgagtcggtgcctagcgtggcaggtctgcattcacaggact

SEQ ID NO: 616 - RNA, 131 nt, synthetic construct
  source 1..131: mol_type = other RNA
cagctccagtcctgtgatccgttttagagctagaaatagcaagttaaaataaggctagtccgttatcaacttgaaaaagtggcaccgagtcggtgctcttgtgaatggaattgaggagctttcacaggact

SEQ ID NO: 617 - RNA, 128 nt, synthetic construct
  source 1..128: mol_type = other RNA
cagctccagtcctgtgatccgttttagagctagaaatagcaagttaaaataaggctagtccgttatcaacttgaaaaagtggcaccgagtcggtgcgctacgggttcgcctgagcaattcacaggact

SEQ ID NO: 618 - RNA, 121 nt, synthetic construct
  source 1..121: mol_type = other RNA
cagctccagtcctgtgatccgttttagagctagaaatagcaagttaaaataaggctagtccgttatcaacttgaaaaagtggcaccgagtcggtgcaggatcatcgatttgtcacaggact

SEQ ID NO: 619 - RNA, 121 nt, synthetic construct
  source 1..121: mol_type = other RNA
cagctccagtcctgtgatccgttttagagctagaaatagcaagttaaaataaggctagtccgttatcaacttgaaaaagtggcaccgagtcggtgcacagctgggcaggtgtcacaggact

SEQ ID NO: 620 - RNA, 134 nt, synthetic construct
  source 1..134: mol_type = other RNA
cagctccagtcctgtgatccgttttagagctagaaatagcaagttaaaataaggctagtccgttatcaacttgaaaaagtggcaccgagtcggtgccatcggtggtcacttggcggagctcgtgtcacaggact

SEQ ID NO: 621 - RNA, 126 nt, synthetic construct
  source 1..126: mol_type = other RNA
cagctccagtcctgtgatccgttttagagctagaaatagcaagttaaaataaggctagtccgttatcaacttgaaaaagtggcaccgagtcggtgcagagcggcggcccggccgtgtcacaggact

SEQ ID NO: 622 - RNA, 136 nt, synthetic construct
  source 1..136: mol_type = other RNA
cagctccagtcctgtgatccgttttagagctagaaatagcaagttaaaataaggctagtccgttatcaacttgaaaaagtggcaccgagtcggtgcaatcggcgaacgaaacccgaagcgcacgtgtcacaggact

SEQ ID NO: 623 - RNA, 121 nt, synthetic construct
  source 1..121: mol_type = other RNA
cagctccagtcctgtgatccgttttagagctagaaatagcaagttaaaataaggctagtccgttatcaacttgaaaaagtggcaccgagtcggtgcgccctgtccgtagtgtcacaggact

SEQ ID NO: 624 - RNA, 124 nt, synthetic construct
  source 1..124: mol_type = other RNA
cagctccagtcctgtgatccgttttagagctagaaatagcaagttaaaataaggctagtccgttatcaacttgaaaaagtggcaccgagtcggtgccattgcatacctatagtgtcacaggact

SEQ ID NO: 625 - RNA, 131 nt, synthetic construct
  source 1..131: mol_type = other RNA
cagctccagtcctgtgatccgttttagagctagaaatagcaagttaaaataaggctagtccgttatcaacttgaaaaagtggcaccgagtcggtgcggccgcagaccgaagcggtgcagtgtcacaggact

SEQ ID NO: 626 - RNA, 124 nt, synthetic construct
  source 1..124: mol_type = other RNA
cagctccagtcctgtgatccgttttagagctagaaatagcaagttaaaataaggctagtccgttatcaacttgaaaaagtggcaccgagtcggtgcgcggccgtcccggggctgtcacaggact

SEQ ID NO: 627 - RNA, 116 nt, synthetic construct
  source 1..116: mol_type = other RNA
cagctccagtcctgtgatccgttttagagctagaaatagcaagttaaaataaggctagtccgttatcaacttgaaaaagtggcaccgagtcggtgcgcctaggctgtcacaggact

SEQ ID NO: 628 - RNA, 128 nt, synthetic construct
  source 1..128: mol_type = other RNA
cagctccagtcctgtgatccgttttagagctagaaatagcaagttaaaataaggctagtccgttatcaacttgaaaaagtggcaccgagtcggtgcccccaaccgccggcggccgatgtcacaggact

SEQ ID NO: 629 - RNA, 128 nt, synthetic construct
  source 1..128: mol_type = other RNA
cagctccagtcctgtgatccgttttagagctagaaatagcaagttaaaataaggctagtccgttatcaacttgaaaaagtggcaccgagtcggtgcagcctgccccgggccgcggtggtcacaggact

SEQ ID NO: 630 - RNA, 116 nt, synthetic construct
  source 1..116: mol_type = other RNA
cagctccagtcctgtgatccgttttagagctagaaatagcaagttaaaataaggctagtccgttatcaacttgaaaaagtggcaccgagtcggtgcctgacactggtcacaggact

SEQ ID NO: 631 - RNA, 136 nt, synthetic construct
  source 1..136: mol_type = other RNA
cagctccagtcctgtgatccgttttagagctagaaatagcaagttaaaataaggctagtccgttatcaacttgaaaaagtggcaccgagtcggtgcaagacaccgcctgggccccgattgatatggtcacaggact

SEQ ID NO: 632 - RNA, 126 nt, synthetic construct
  source 1..126: mol_type = other RNA
cagctccagtcctgtgatccgttttagagctagaaatagcaagttaaaataaggctagtccgttatcaacttgaaaaagtggcaccgagtcggtgcggccggacggggcggcggggtcacaggact

SEQ ID NO: 633 - RNA, 141 nt, synthetic construct
  source 1..141: mol_type = other RNA
cagctccagtcctgtgatccgttttagagctagaaatagcaagttaaaataaggctagtccgttatcaacttgaaaaagtggcaccgagtcggtgccacccggcccgccgctcccgggcccggggccggggtcacaggact

SEQ ID NO: 634 - RNA, 116 nt, synthetic construct
  source 1..116: mol_type = other RNA
cagctccagtcctgtgatccgttttagagctagaaatagcaagttaaaataaggctagtccgttatcaacttgaaaaagtggcaccgagtcggtgccaccggcgggtcacaggact

SEQ ID NO: 635 - RNA, 126 nt, synthetic construct
  source 1..126: mol_type = other RNA
cagctccagtcctgtgatccgttttagagctagaaatagcaagttaaaataaggctagtccgttatcaacttgaaaaagtggcaccgagtcggtgctggtacggccggattccgggtcacaggact

SEQ ID NO: 636 - RNA, 121 nt, synthetic construct
  source 1..121: mol_type = other RNA
cagctccagtcctgtgatccgttttagagctagaaatagcaagttaaaataaggctagtccgttatcaacttgaaaaagtggcaccgagtcggtgcccgggtggcgccgggtcacaggact

SEQ ID NO: 637 - RNA, 131 nt, synthetic construct
  source 1..131: mol_type = other RNA
cagctccagtcctgtgatccgttttagagctagaaatagcaagttaaaataaggctagtccgttatcaacttgaaaaagtggcaccgagtcggtgctcggcggccgggctcaggcgccgggtcacaggact

SEQ ID NO: 638 - RNA, 131 nt, synthetic construct
  source 1..131: mol_type = other RNA
cagctccagtcctgtgatccgttttagagctagaaatagcaagttaaaataaggctagtccgttatcaacttgaaaaagtggcaccgagtcggtgcggcgaggcagccccaaggccccgggtcacaggact

SEQ ID NO: 639 - RNA, 128 nt, synthetic construct
  source 1..128: mol_type = other RNA
cagctccagtcctgtgatccgttttagagctagaaatagcaagttaaaataaggctagtccgttatcaacttgaaaaagtggcaccgagtcggtgcgttcgcgggtgggcgttacgggtcacaggact

SEQ ID NO: 640 - RNA, 126 nt, synthetic construct
  source 1..126: mol_type = other RNA
cagctccagtcctgtgatccgttttagagctagaaatagcaagttaaaataaggctagtccgttatcaacttgaaaaagtggcaccgagtcggtgcctaccctcctccgcgacgggtcacaggact

SEQ ID NO: 641 - RNA, 134 nt, synthetic construct
  source 1..134: mol_type = other RNA
cagctccagtcctgtgatccgttttagagctagaaatagcaagttaaaataaggctagtccgttatcaacttgaaaaagtggcaccgagtcggtgcgtgaagtcggcgtgaccgagggcacgggtcacaggact

SEQ ID NO: 642 - RNA, 116 nt, synthetic construct
  source 1..116: mol_type = other RNA
cagctccagtcctgtgatccgttttagagctagaaatagcaagttaaaataaggctagtccgttatcaacttgaaaaagtggcaccgagtcggtgcccggcaagggtcacaggact

SEQ ID NO: 643 - RNA, 131 nt, synthetic construct
  source 1..131: mol_type = other RNA
cagctccagtcctgtgatccgttttagagctagaaatagcaagttaaaataaggctagtccgttatcaacttgaaaaagtggcaccgagtcggtgctggtagtttccggtttcggcctcggtcacaggact

SEQ ID NO: 644 - RNA, 126 nt, synthetic construct
  source 1..126: mol_type = other RNA
cagctccagtcctgtgatccgttttagagctagaaatagcaagttaaaataaggctagtccgttatcaacttgaaaaagtggcaccgagtcggtgctcggacaccctagacctcggtcacaggact

SEQ ID NO: 645 - RNA, 128 nt, synthetic construct
  source 1..128: mol_type = other RNA
cagctccagtcctgtgatccgttttagagctagaaatagcaagttaaaataaggctagtccgttatcaacttgaaaaagtggcaccgagtcggtgcggcgcgggcgggccgggatcggtcacaggact

SEQ ID NO: 646 - RNA, 126 nt, synthetic construct
  source 1..126: mol_type = other RNA
cagctccagtcctgtgatccgttttagagctagaaatagcaagttaaaataaggctagtccgttatcaacttgaaaaagtggcaccgagtcggtgcgccccacgggccgagtgcggtcacaggact

SEQ ID NO: 647 - RNA, 134 nt, synthetic construct
  source 1..134: mol_type = other RNA
cagctccagtcctgtgatccgttttagagctagaaatagcaagttaaaataaggctagtccgttatcaacttgaaaaagtggcaccgagtcggtgcagctgcagcccgcctccacgacgggcggtcacaggact

SEQ ID NO: 648 - RNA, 141 nt, synthetic construct
  source 1..141: mol_type = other RNA
cagctccagtcctgtgatccgttttagagctagaaatagcaagttaaaataaggctagtccgttatcaacttgaaaaagtggcaccgagtcggtgccccgcgccgccagccctagggtggccgctcggcggtcacaggact

SEQ ID NO: 649 - RNA, 146 nt, synthetic construct
  source 1..146: mol_type = other RNA
cagctccagtcctgtgatccgttttagagctagaaatagcaagttaaaataaggctagtccgttatcaacttgaaaaagtggcaccgagtcggtgcgcggggcccggcgagtttggcagcgcgacgagcctcgcggtcacaggact

SEQ ID NO: 650 - RNA, 128 nt, synthetic construct
  source 1..128: mol_type = other RNA
cagctccagtcctgtgatccgttttagagctagaaatagcaagttaaaataaggctagtccgttatcaacttgaaaaagtggcaccgagtcggtgcgccgcccgcctccgcggcgcggtcacaggact

SEQ ID NO: 651 - RNA, 124 nt, synthetic construct
  source 1..124: mol_type = other RNA
cagctccagtcctgtgatccgttttagagctagaaatagcaagttaaaataaggctagtccgttatcaacttgaaaaagtggcaccgagtcggtgcgccgtaacctccgcgcggtcacaggact

SEQ ID NO: 652 - RNA, 146 nt, synthetic construct
  source 1..146: mol_type = other RNA
cagctccagtcctgtgatccgttttagagctagaaatagcaagttaaaataaggctagtccgttatcaacttgaaaaagtggcaccgagtcggtgcgcgccggcgcgccaggcgcggcccggccgtgcccgcgcggtcacaggact

SEQ ID NO: 653 - RNA, 141 nt, synthetic construct
  source 1..141: mol_type = other RNA
cagctccagtcctgtgatccgttttagagctagaaatagcaagttaaaataaggctagtccgttatcaacttgaaaaagtggcaccgagtcggtgccgctggggcctcccgtcggggcctggcacgcgcggtcacaggact

SEQ ID NO: 654 - RNA, 116 nt, synthetic construct
  source 1..116: mol_type = other RNA
cagctccagtcctgtgatccgttttagagctagaaatagcaagttaaaataaggctagtccgttatcaacttgaaaaagtggcaccgagtcggtgcgccagcgcggtcacaggact

SEQ ID NO: 655 - RNA, 121 nt, synthetic construct
  source 1..121: mol_type = other RNA
cagctccagtcctgtgatccgttttagagctagaaatagcaagttaaaataaggctagtccgttatcaacttgaaaaagtggcaccgagtcggtgcattgttcgcaagcggtcacaggact

SEQ ID NO: 656 - RNA, 128 nt, synthetic construct
  source 1..128: mol_type = other RNA
cagctccagtcctgtgatccgttttagagctagaaatagcaagttaaaataaggctagtccgttatcaacttgaaaaagtggcaccgagtcggtgcggggcccggcctcaggggccggtcacaggact

SEQ ID NO: 657 - RNA, 126 nt, synthetic construct
  source 1..126: mol_type = other RNA
cagctccagtcctgtgatccgttttagagctagaaatagcaagttaaaataaggctagtccgttatcaacttgaaaaagtggcaccgagtcggtgccctttagaaggccaggccggtcacaggact

SEQ ID NO: 658 - RNA, 136 nt, synthetic construct
  source 1..136: mol_type = other RNA
cagctccagtcctgtgatccgttttagagctagaaatagcaagttaaaataaggctagtccgttatcaacttgaaaaagtggcaccgagtcggtgcgccccgcagcggcacggcctgtggcgccggtcacaggact

SEQ ID NO: 659 - RNA, 116 nt, synthetic construct
  source 1..116: mol_type = other RNA
cagctccagtcctgtgatccgttttagagctagaaatagcaagttaaaataaggctagtccgttatcaacttgaaaaagtggcaccgagtcggtgctgtccgccggtcacaggact

SEQ ID NO: 660 - RNA, 131 nt, synthetic construct
  source 1..131: mol_type = other RNA
cagctccagtcctgtgatccgttttagagctagaaatagcaagttaaaataaggctagtccgttatcaacttgaaaaagtggcaccgagtcggtgcctagcttcgatcgctacggagccggtcacaggact

SEQ ID NO: 661 - RNA, 136 nt, synthetic construct
  source 1..136: mol_type = other RNA
cagctccagtcctgtgatccgttttagagctagaaatagcaagttaaaataaggctagtccgttatcaacttgaaaaagtggcaccgagtcggtgctcgacggtatcggcccagcctgcgagccggtcacaggact

SEQ ID NO: 662 - RNA, 134 nt, synthetic construct
  source 1..134: mol_type = other RNA
cagctccagtcctgtgatccgttttagagctagaaatagcaagttaaaataaggctagtccgttatcaacttgaaaaagtggcaccgagtcggtgcacggcgcgcaacaacggccacctcccggtcacaggact

SEQ ID NO: 663 - RNA, 141 nt, synthetic construct
  source 1..141: mol_type = other RNA
cagctccagtcctgtgatccgttttagagctagaaatagcaagttaaaataaggctagtccgttatcaacttgaaaaagtggcaccgagtcggtgcgtacgagccgggccgccggggaagccgttccccggtcacaggact

SEQ ID NO: 664 - RNA, 126 nt, synthetic construct
  source 1..126: mol_type = other RNA
cagctccagtcctgtgatccgttttagagctagaaatagcaagttaaaataaggctagtccgttatcaacttgaaaaagtggcaccgagtcggtgctttacactagatggtgctgttcacaggact

SEQ ID NO: 665 - RNA, 121 nt, synthetic construct
  source 1..121: mol_type = other RNA
cagctccagtcctgtgatccgttttagagctagaaatagcaagttaaaataaggctagtccgttatcaacttgaaaaagtggcaccgagtcggtgccggacgtgctaccggtcacaggact

SEQ ID NO: 666 - RNA, 131 nt, synthetic construct
  source 1..131: mol_type = other RNA
cagctccagtcctgtgatccgttttagagctagaaatagcaagttaaaataaggctagtccgttatcaacttgaaaaagtggcaccgagtcggtgcatggcagtaggtgtcaatactacggtcacaggact

SEQ ID NO: 667 - RNA, 116 nt, synthetic construct
  source 1..116: mol_type = other RNA
cagctccagtcctgtgatccgttttagagctagaaatagcaagttaaaataaggctagtccgttatcaacttgaaaaagtggcaccgagtcggtgccggaggacggtcacaggact

SEQ ID NO: 668 - RNA, 126 nt, synthetic construct
  source 1..126: mol_type = other RNA
cagctccagtcctgtgatccgttttagagctagaaatagcaagttaaaataaggctagtccgttatcaacttgaaaaagtggcaccgagtcggtgctgcgggcggccgtgtataggtcacaggact

SEQ ID NO: 669 - RNA, 121 nt, synthetic construct
  source 1..121: mol_type = other RNA
cagctccagtcctgtgatccgttttagagctagaaatagcaagttaaaataaggctagtccgttatcaacttgaaaaagtggcaccgagtcggtgctgcgggtcaccgaggtcacaggact

SEQ ID NO: 670 - RNA, 121 nt, synthetic construct
  source 1..121: mol_type = other RNA
cagctccagtcctgtgatccgttttagagctagaaatagcaagttaaaataaggctagtccgttatcaacttgaaaaagtggcaccgagtcggtgcgccacgaggctcaggtcacaggact

SEQ ID NO: 671 - RNA, 131 nt, synthetic construct
  source 1..131: mol_type = other RNA
cagctccagtcctgtgatccgttttagagctagaaatagcaagttaaaataaggctagtccgttatcaacttgaaaaagtggcaccgagtcggtgcttaaaggggacaataacgcttaaggtcacaggact

SEQ ID NO: 672 - RNA, 126 nt, synthetic construct
  source 1..126: mol_type = other RNA
cagctccagtcctgtgatccgttttagagctagaaatagcaagttaaaataaggctagtccgttatcaacttgaaaaagtggcaccgagtcggtgcgaaacttaaagatgataaggtcacaggact

SEQ ID NO: 673 - RNA, 128 nt, synthetic construct
  source 1..128: mol_type = other RNA
cagctccagtcctgtgatccgttttagagctagaaatagcaagttaaaataaggctagtccgttatcaacttgaaaaagtggcaccgagtcggtgccgctccgcgtcccaataggtcgtcacaggact

SEQ ID NO: 674 - RNA, 131 nt, synthetic construct
  source 1..131: mol_type = other RNA
cagctccagtcctgtgatccgttttagagctagaaatagcaagttaaaataaggctagtccgttatcaacttgaaaaagtggcaccgagtcggtgcccttgtgggctgcgccgagcagtcgtcacaggact

SEQ ID NO: 675 - RNA, 121 nt, synthetic construct
  source 1..121: mol_type = other RNA
cagctccagtcctgtgatccgttttagagctagaaatagcaagttaaaataaggctagtccgttatcaacttgaaaaagtggcaccgagtcggtgcgccgccctggcctcgtcacaggact

SEQ ID NO: 676 - RNA, 141 nt, synthetic construct
  source 1..141: mol_type = other RNA
cagctccagtcctgtgatccgttttagagctagaaatagcaagttaaaataaggctagtccgttatcaacttgaaaaagtggcaccgagtcggtgcgggccaagccgcaggtaccggagaacccggtggcgtcacaggact

SEQ ID NO: 677 - RNA, 134 nt, synthetic construct
  source 1..134: mol_type = other RNA
cagctccagtcctgtgatccgttttagagctagaaatagcaagttaaaataaggctagtccgttatcaacttgaaaaagtggcaccgagtcggtgcagcatatttcacctattggacctgggcgtcacaggact

SEQ ID NO: 678 - RNA, 146 nt, synthetic construct
  source 1..146: mol_type = other RNA
cagctccagtcctgtgatccgttttagagctagaaatagcaagttaaaataaggctagtccgttatcaacttgaaaaagtggcaccgagtcggtgcgcgcgcgggcattgggcgcgggccggcgcgggctggggcgtcacaggact

SEQ ID NO: 679 - RNA, 134 nt, synthetic construct
  source 1..134: mol_type = other RNA
cagctccagtcctgtgatccgttttagagctagaaatagcaagttaaaataaggctagtccgttatcaacttgaaaaagtggcaccgagtcggtgcgcccgctcagcctccccggcccggggcgtcacaggact

SEQ ID NO: 680 - RNA, 134 nt, synthetic construct
  source 1..134: mol_type = other RNA
cagctccagtcctgtgatccgttttagagctagaaatagcaagttaaaataaggctagtccgttatcaacttgaaaaagtggcaccgagtcggtgcccggggacgccacgcgcggtgcgcggcgtcacaggact

SEQ ID NO: 681 - RNA, 124 nt, synthetic construct
  source 1..124: mol_type = other RNA
cagctccagtcctgtgatccgttttagagctagaaatagcaagttaaaataaggctagtccgttatcaacttgaaaaagtggcaccgagtcggtgctacccggccgctccggcgtcacaggact

SEQ ID NO: 682 - RNA, 126 nt, synthetic construct
  source 1..126: mol_type = other RNA
cagctccagtcctgtgatccgttttagagctagaaatagcaagttaaaataaggctagtccgttatcaacttgaaaaagtggcaccgagtcggtgcgctgggcgacggccggcgcgtcacaggact

SEQ ID NO: 683 - RNA, 131 nt, synthetic construct
  source 1..131: mol_type = other RNA
cagctccagtcctgtgatccgttttagagctagaaatagcaagttaaaataaggctagtccgttatcaacttgaaaaagtggcaccgagtcggtgccctaccaccctccgcagcgcgcgcgtcacaggact

SEQ ID NO: 684 - RNA, 141 nt, synthetic construct
  source 1..141: mol_type = other RNA
cagctccagtcctgtgatccgttttagagctagaaatagcaagttaaaataaggctagtccgttatcaacttgaaaaagtggcaccgagtcggtgcaagtagggcaggggacatccggtcccgctagcgcgtcacaggact

SEQ ID NO: 685 - RNA, 141 nt, synthetic construct
  source 1..141: mol_type = other RNA
cagctccagtcctgtgatccgttttagagctagaaatagcaagttaaaataaggctagtccgttatcaacttgaaaaagtggcaccgagtcggtgccgccgccagcgcgcgacgcggtgccggccgccgcgtcacaggact

SEQ ID NO: 686 - RNA, 134 nt, synthetic construct
  source 1..134: mol_type = other RNA
cagctccagtcctgtgatccgttttagagctagaaatagcaagttaaaataaggctagtccgttatcaacttgaaaaagtggcaccgagtcggtgcggggcggcgccggcggccggctcccgcgtcacaggact

SEQ ID NO: 687 - RNA, 131 nt, synthetic construct
  source 1..131: mol_type = other RNA
cagctccagtcctgtgatccgttttagagctagaaatagcaagttaaaataaggctagtccgttatcaacttgaaaaagtggcaccgagtcggtgcgcgtcgcccgccggcagcggacgcgtcacaggact

SEQ ID NO: 688 - RNA, 116 nt, synthetic construct
  source 1..116: mol_type = other RNA
cagctccagtcctgtgatccgttttagagctagaaatagcaagttaaaataaggctagtccgttatcaacttgaaaaagtggcaccgagtcggtgccgagcgagcgtcacaggact

SEQ ID NO: 689 - RNA, 146 nt, synthetic construct
  source 1..146: mol_type = other RNA
cagctccagtcctgtgatccgttttagagctagaaatagcaagttaaaataaggctagtccgttatcaacttgaaaaagtggcaccgagtcggtgccgtcgcccggacggggcccggcccacgcgcgagtctgccgtcacaggact

SEQ ID NO: 690 - RNA, 124 nt, synthetic construct
  source 1..124: mol_type = other RNA
cagctccagtcctgtgatccgttttagagctagaaatagcaagttaaaataaggctagtccgttatcaacttgaaaaagtggcaccgagtcggtgctctgccctcctcttgggttcacaggact

SEQ ID NO: 691 - RNA, 124 nt, synthetic construct
  source 1..124: mol_type = other RNA
cagctccagtcctgtgatccgttttagagctagaaatagcaagttaaaataaggctagtccgttatcaacttgaaaaagtggcaccgagtcggtgcatcgcgcgctggtggccgtcacaggact

SEQ ID NO: 692 - RNA, 124 nt, synthetic construct
  source 1..124: mol_type = other RNA
cagctccagtcctgtgatccgttttagagctagaaatagcaagttaaaataaggctagtccgttatcaacttgaaaaagtggcaccgagtcggtgcccctcgtacagcgcgccgtcacaggact

SEQ ID NO: 693 - RNA, 134 nt, synthetic construct
  source 1..134: mol_type = other RNA
cagctccagtcctgtgatccgttttagagctagaaatagcaagttaaaataaggctagtccgttatcaacttgaaaaagtggcaccgagtcggtgcgcacggggcacgtcccgggacgtagccgtcacaggact

SEQ ID NO: 694 - RNA, 121 nt, synthetic construct
  source 1..121: mol_type = other RNA
cagctccagtcctgtgatccgttttagagctagaaatagcaagttaaaataaggctagtccgttatcaacttgaaaaagtggcaccgagtcggtgccccggcgaccagccgtcacaggact

SEQ ID NO: 695 - RNA, 136 nt, synthetic construct
  source 1..136: mol_type = other RNA
cagctccagtcctgtgatccgttttagagctagaaatagcaagttaaaataaggctagtccgttatcaacttgaaaaagtggcaccgagtcggtgcaaagggttgcactttgctgatacgtggggttcacaggact

SEQ ID NO: 696 - RNA, 136 nt, synthetic construct
  source 1..136: mol_type = other RNA
cagctccagtcctgtgatccgttttagagctagaaatagcaagttaaaataaggctagtccgttatcaacttgaaaaagtggcaccgagtcggtgcgtgcgccgggccccgcgccccagcctcccgtcacaggact

SEQ ID NO: 697 - RNA, 121 nt, synthetic construct
  source 1..121: mol_type = other RNA
cagctccagtcctgtgatccgttttagagctagaaatagcaagttaaaataaggctagtccgttatcaacttgaaaaagtggcaccgagtcggtgccgcacgcggggcccgtcacaggact

SEQ ID NO: 698 - RNA, 131 nt, synthetic construct
  source 1..131: mol_type = other RNA
cagctccagtcctgtgatccgttttagagctagaaatagcaagttaaaataaggctagtccgttatcaacttgaaaaagtggcaccgagtcggtgcttgcggtggtgtcgggtgcggcccgtcacaggact

SEQ ID NO: 699 - RNA, 124 nt, synthetic construct
  source 1..124: mol_type = other RNA
cagctccagtcctgtgatccgttttagagctagaaatagcaagttaaaataaggctagtccgttatcaacttgaaaaagtggcaccgagtcggtgccatcagcggagctccccgtcacaggact

SEQ ID NO: 700 - RNA, 131 nt, synthetic construct
  source 1..131: mol_type = other RNA
cagctccagtcctgtgatccgttttagagctagaaatagcaagttaaaataaggctagtccgttatcaacttgaaaaagtggcaccgagtcggtgcgagggcggttagagtgccattaccgtcacaggact

SEQ ID NO: 701 - RNA, 128 nt, synthetic construct
  source 1..128: mol_type = other RNA
cagctccagtcctgtgatccgttttagagctagaaatagcaagttaaaataaggctagtccgttatcaacttgaaaaagtggcaccgagtcggtgcgaaagtcgctgcgcgcggaccgtcacaggact

SEQ ID NO: 702 - RNA, 121 nt, synthetic construct
  source 1..121: mol_type = other RNA
cagctccagtcctgtgatccgttttagagctagaaatagcaagttaaaataaggctagtccgttatcaacttgaaaaagtggcaccgagtcggtgcccccgggccggaccgtcacaggact

SEQ ID NO: 703 - RNA, 124 nt, synthetic construct
  source 1..124: mol_type = other RNA
cagctccagtcctgtgatccgttttagagctagaaatagcaagttaaaataaggctagtccgttatcaacttgaaaaagtggcaccgagtcggtgccgatcttcccgaacaccgtcacaggact

SEQ ID NO: 704 - RNA, 131 nt, synthetic construct
  source 1..131: mol_type = other RNA
cagctccagtcctgtgatccgttttagagctagaaatagcaagttaaaataaggctagtccgttatcaacttgaaaaagtggcaccgagtcggtgctgcacgggtacactgaagccctacgtcacaggact

SEQ ID NO: 705 - RNA, 134 nt, synthetic construct
  source 1..134: mol_type = other RNA
cagctccagtcctgtgatccgttttagagctagaaatagcaagttaaaataaggctagtccgttatcaacttgaaaaagtggcaccgagtcggtgcatatctcgttggtatttaatatgatacgtcacaggact

SEQ ID NO: 706 - RNA, 126 nt, synthetic construct
  source 1..126: mol_type = other RNA
cagctccagtcctgtgatccgttttagagctagaaatagcaagttaaaataaggctagtccgttatcaacttgaaaaagtggcaccgagtcggtgcgggcgtcggacccatcgacgtcacaggact

SEQ ID NO: 707 - RNA, 121 nt, synthetic construct
  source 1..121: mol_type = other RNA
cagctccagtcctgtgatccgttttagagctagaaatagcaagttaaaataaggctagtccgttatcaacttgaaaaagtggcaccgagtcggtgcgacacgcgcggcacgtcacaggact

SEQ ID NO: 708 - RNA, 128 nt, synthetic construct
  source 1..128: mol_type = other RNA
cagctccagtcctgtgatccgttttagagctagaaatagcaagttaaaataaggctagtccgttatcaacttgaaaaagtggcaccgagtcggtgctcctaacagcggacgacccacgtcacaggact

SEQ ID NO: 709 - RNA, 141 nt, synthetic construct
  source 1..141: mol_type = other RNA
cagctccagtcctgtgatccgttttagagctagaaatagcaagttaaaataaggctagtccgttatcaacttgaaaaagtggcaccgagtcggtgctcccctcccggcacgccgcgcggctcgccagaacgtcacaggact

SEQ ID NO: 710 - RNA, 134 nt, synthetic construct
  source 1..134: mol_type = other RNA
cagctccagtcctgtgatccgttttagagctagaaatagcaagttaaaataaggctagtccgttatcaacttgaaaaagtggcaccgagtcggtgcttacctattaccaagggctacatcttagtcacaggact

SEQ ID NO: 711 - RNA, 134 nt, synthetic construct
  source 1..134: mol_type = other RNA
cagctccagtcctgtgatccgttttagagctagaaatagcaagttaaaataaggctagtccgttatcaacttgaaaaagtggcaccgagtcggtgctagcactctatcgcataagtcattctagtcacaggact

SEQ ID NO: 712 - RNA, 116 nt, synthetic construct
  source 1..116: mol_type = other RNA
cagctccagtcctgtgatccgttttagagctagaaatagcaagttaaaataaggctagtccgttatcaacttgaaaaagtggcaccgagtcggtgcgcagtgctagtcacaggact

SEQ ID NO: 713 - RNA, 136 nt, synthetic construct
  source 1..136: mol_type = other RNA
cagctccagtcctgtgatccgttttagagctagaaatagcaagttaaaataaggctagtccgttatcaacttgaaaaagtggcaccgagtcggtgcgcgcgaacctgggatcgccatgcatgatagtcacaggact

SEQ ID NO: 714 - RNA, 128 nt, synthetic construct
  source 1..128: mol_type = other RNA
cagctccagtcctgtgatccgttttagagctagaaatagcaagttaaaataaggctagtccgttatcaacttgaaaaagtggcaccgagtcggtgcgccgactcagtgctgctctgagtcacaggact

SEQ ID NO: 715 - RNA, 134 nt, synthetic construct
  source 1..134: mol_type = other RNA
cagctccagtcctgtgatccgttttagagctagaaatagcaagttaaaataaggctagtccgttatcaacttgaaaaagtggcaccgagtcggtgcggagagatcacgctcgatacgaggggagtcacaggact

SEQ ID NO: 716 - RNA, 136 nt, synthetic construct
  source 1..136: mol_type = other RNA
cagctccagtcctgtgatccgttttagagctagaaatagcaagttaaaataaggctagtccgttatcaacttgaaaaagtggcaccgagtcggtgcatggcggactcagcgcgccgaagaacggagtcacaggact

SEQ ID NO: 717 - RNA, 126 nt, synthetic construct
  source 1..126: mol_type = other RNA
cagctccagtcctgtgatccgttttagagctagaaatagcaagttaaaataaggctagtccgttatcaacttgaaaaagtggcaccgagtcggtgcacttcacatccagtgacgagtcacaggact

SEQ ID NO: 718 - RNA, 126 nt, synthetic construct
  source 1..126: mol_type = other RNA
cagctccagtcctgtgatccgttttagagctagaaatagcaagttaaaataaggctagtccgttatcaacttgaaaaagtggcaccgagtcggtgcaagcgagtcagaagagagagtcacaggact

SEQ ID NO: 719 - RNA, 136 nt, synthetic construct
  source 1..136: mol_type = other RNA
cagctccagtcctgtgatccgttttagagctagaaatagcaagttaaaataaggctagtccgttatcaacttgaaaaagtggcaccgagtcggtgccagcgccccgccggcgtaccgccctagcagtcacaggact

SEQ ID NO: 720 - RNA, 136 nt, synthetic construct
  source 1..136: mol_type = other RNA
cagctccagtcctgtgatccgttttagagctagaaatagcaagttaaaataaggctagtccgttatcaacttgaaaaagtggcaccgagtcggtgcgccttactcgaccgccacgacctcgtccagtcacaggact

SEQ ID NO: 721 - RNA, 136 nt, synthetic construct
  source 1..136: mol_type = other RNA
cagctccagtcctgtgatccgttttagagctagaaatagcaagttaaaataaggctagtccgttatcaacttgaaaaagtggcaccgagtcggtgccctcggatggggccgcggctacgggtacagtcacaggact

SEQ ID NO: 722 - RNA, 121 nt, synthetic construct
  source 1..121: mol_type = other RNA
cagctccagtcctgtgatccgttttagagctagaaatagcaagttaaaataaggctagtccgttatcaacttgaaaaagtggcaccgagtcggtgcaattctgatgtaaagtcacaggact

SEQ ID NO: 723 - RNA, 131 nt, synthetic construct
  source 1..131: mol_type = other RNA
cagctccagtcctgtgatccgttttagagctagaaatagcaagttaaaataaggctagtccgttatcaacttgaaaaagtggcaccgagtcggtgctgataggtaaggtgtaattactttctcacaggact

SEQ ID NO: 724 - RNA, 116 nt, synthetic construct
  source 1..116: mol_type = other RNA
cagctccagtcctgtgatccgttttagagctagaaatagcaagttaaaataaggctagtccgttatcaacttgaaaaagtggcaccgagtcggtgcgtacggcttctcacaggact

SEQ ID NO: 725 - RNA, 124 nt, synthetic construct
  source 1..124: mol_type = other RNA
cagctccagtcctgtgatccgttttagagctagaaatagcaagttaaaataaggctagtccgttatcaacttgaaaaagtggcaccgagtcggtgctggggtacttatgtcgtctcacaggact

SEQ ID NO: 726 - RNA, 124 nt, synthetic construct
  source 1..124: mol_type = other RNA
cagctccagtcctgtgatccgttttagagctagaaatagcaagttaaaataaggctagtccgttatcaacttgaaaaagtggcaccgagtcggtgcctatccggtccgagcgtctcacaggact

SEQ ID NO: 727 - RNA, 136 nt, synthetic construct
  source 1..136: mol_type = other RNA
cagctccagtcctgtgatccgttttagagctagaaatagcaagttaaaataaggctagtccgttatcaacttgaaaaagtggcaccgagtcggtgcctgagcggcgaaggcatcccggcctccgtctcacaggact

SEQ ID NO: 728 - RNA, 134 nt, synthetic construct
  source 1..134: mol_type = other RNA
cagctccagtcctgtgatccgttttagagctagaaatagcaagttaaaataaggctagtccgttatcaacttgaaaaagtggcaccgagtcggtgcgctgtgggtcgcagtcacgcgggccgtctcacaggact

SEQ ID NO: 729 - RNA, 121 nt, synthetic construct
  source 1..121: mol_type = other RNA
cagctccagtcctgtgatccgttttagagctagaaatagcaagttaaaataaggctagtccgttatcaacttgaaaaagtggcaccgagtcggtgcgcacacaacgacgtctcacaggact

SEQ ID NO: 730 - RNA, 124 nt, synthetic construct
  source 1..124: mol_type = other RNA
cagctccagtcctgtgatccgttttagagctagaaatagcaagttaaaataaggctagtccgttatcaacttgaaaaagtggcaccgagtcggtgcactacgggtgggaacctctcacaggact

SEQ ID NO: 731 - RNA, 141 nt, synthetic construct
  source 1..141: mol_type = other RNA
cagctccagtcctgtgatccgttttagagctagaaatagcaagttaaaataaggctagtccgttatcaacttgaaaaagtggcaccgagtcggtgctcaaacatgaattcttcacgttgttaaagattatctcacaggact

SEQ ID NO: 732 - RNA, 141 nt, synthetic construct
  source 1..141: mol_type = other RNA
cagctccagtcctgtgatccgttttagagctagaaatagcaagttaaaataaggctagtccgttatcaacttgaaaaagtggcaccgagtcggtgcggtccattggcactaggggcgttcagtatcatatctcacaggact

SEQ ID NO: 733 - RNA, 136 nt, synthetic construct
  source 1..136: mol_type = other RNA
cagctccagtcctgtgatccgttttagagctagaaatagcaagttaaaataaggctagtccgttatcaacttgaaaaagtggcaccgagtcggtgctaactgctctatatacgagattatcaaatctcacaggact

SEQ ID NO: 734 - RNA, 134 nt, synthetic construct
  source 1..134: mol_type = other RNA
cagctccagtcctgtgatccgttttagagctagaaatagcaagttaaaataaggctagtccgttatcaacttgaaaaagtggcaccgagtcggtgccgatacggcgcccacggcggtgcattgctcacaggact

SEQ ID NO: 735 - RNA, 146 nt, synthetic construct
  source 1..146: mol_type = other RNA
cagctccagtcctgtgatccgttttagagctagaaatagcaagttaaaataaggctagtccgttatcaacttgaaaaagtggcaccgagtcggtgctccctgtccgccacctggcgctgctggcgtggacatgtgctcacaggact

SEQ ID NO: 736 - RNA, 136 nt, synthetic construct
  source 1..136: mol_type = other RNA
cagctccagtcctgtgatccgttttagagctagaaatagcaagttaaaataaggctagtccgttatcaacttgaaaaagtggcaccgagtcggtgcccggcgcagggcggaccgacgagagcgtgctcacaggact

SEQ ID NO: 737 - RNA, 124 nt, synthetic construct
  source 1..124: mol_type = other RNA
cagctccagtcctgtgatccgttttagagctagaaatagcaagttaaaataaggctagtccgttatcaacttgaaaaagtggcaccgagtcggtgcactctatcgattatctgctcacaggact

SEQ ID NO: 738 - RNA, 141 nt, synthetic construct
  source 1..141: mol_type = other RNA
cagctccagtcctgtgatccgttttagagctagaaatagcaagttaaaataaggctagtccgttatcaacttgaaaaagtggcaccgagtcggtgcactgccggggccggcgccgtcgcagcgtccgatgctcacaggact

SEQ ID NO: 739 - RNA, 131 nt, synthetic construct
  source 1..131: mol_type = other RNA
cagctccagtcctgtgatccgttttagagctagaaatagcaagttaaaataaggctagtccgttatcaacttgaaaaagtggcaccgagtcggtgcaaacagacattgtgcctgtgcatgctcacaggact

SEQ ID NO: 740 - RNA, 131 nt, synthetic construct
  source 1..131: mol_type = other RNA
cagctccagtcctgtgatccgttttagagctagaaatagcaagttaaaataaggctagtccgttatcaacttgaaaaagtggcaccgagtcggtgccgcgctccagcggtcggggcctggctcacaggact

SEQ ID NO: 741 - RNA, 131 nt, synthetic construct
  source 1..131: mol_type = other RNA
cagctccagtcctgtgatccgttttagagctagaaatagcaagttaaaataaggctagtccgttatcaacttgaaaaagtggcaccgagtcggtgccccctgcgcggaccgcgccttccgttcacaggact

SEQ ID NO: 742 - RNA, 128 nt, synthetic construct
  source 1..128: mol_type = other RNA
cagctccagtcctgtgatccgttttagagctagaaatagcaagttaaaataaggctagtccgttatcaacttgaaaaagtggcaccgagtcggtgctggaaatgccgtggcgtggggctcacaggact

SEQ ID NO: 743 - RNA, 124 nt, synthetic construct
  source 1..124: mol_type = other RNA
cagctccagtcctgtgatccgttttagagctagaaatagcaagttaaaataaggctagtccgttatcaacttgaaaaagtggcaccgagtcggtgcatgcgcgcgctgtcgggctcacaggact

SEQ ID NO: 744 - RNA, 124 nt, synthetic construct
  source 1..124: mol_type = other RNA
cagctccagtcctgtgatccgttttagagctagaaatagcaagttaaaataaggctagtccgttatcaacttgaaaaagtggcaccgagtcggtgccgggcggcgggagcgggctcacaggact

SEQ ID NO: 745 - RNA, 131 nt, synthetic construct
  source 1..131: mol_type = other RNA
cagctccagtcctgtgatccgttttagagctagaaatagcaagttaaaataaggctagtccgttatcaacttgaaaaagtggcaccgagtcggtgcggcaacgggacgtccccggggcggctcacaggact

SEQ ID NO: 746 - RNA, 126 nt, synthetic construct
  source 1..126: mol_type = other RNA
cagctccagtcctgtgatccgttttagagctagaaatagcaagttaaaataaggctagtccgttatcaacttgaaaaagtggcaccgagtcggtgcccagtcggccctgctccggctcacaggact

SEQ ID NO: 747 - RNA, 131 nt, synthetic construct
  source 1..131: mol_type = other RNA
cagctccagtcctgtgatccgttttagagctagaaatagcaagttaaaataaggctagtccgttatcaacttgaaaaagtggcaccgagtcggtgcacgcaggccttgcctccacgacggctcacaggact

SEQ ID NO: 748 - RNA, 141 nt, synthetic construct
  source 1..141: mol_type = other RNA
cagctccagtcctgtgatccgttttagagctagaaatagcaagttaaaataaggctagtccgttatcaacttgaaaaagtggcaccgagtcggtgccgtgcccgcagccggttggagtgtgagcgggaggctcacaggact

SEQ ID NO: 749 - RNA, 121 nt, synthetic construct
  source 1..121: mol_type = other RNA
cagctccagtcctgtgatccgttttagagctagaaatagcaagttaaaataaggctagtccgttatcaacttgaaaaagtggcaccgagtcggtgcgcggtgggcggaggctcacaggact

SEQ ID NO: 750 - RNA, 126 nt, synthetic construct
  source 1..126: mol_type = other RNA
cagctccagtcctgtgatccgttttagagctagaaatagcaagttaaaataaggctagtccgttatcaacttgaaaaagtggcaccgagtcggtgcagcggcttcgaatctcaggctcacaggact

SEQ ID NO: 751 - RNA, 146 nt, synthetic construct
  source 1..146: mol_type = other RNA
cagctccagtcctgtgatccgttttagagctagaaatagcaagttaaaataaggctagtccgttatcaacttgaaaaagtggcaccgagtcggtgccgaccggtgcgggccctcgtcgaggagcaagggtgcaggctcacaggact

SEQ ID NO: 752 - RNA, 128 nt, synthetic construct
  source 1..128: mol_type = other RNA
cagctccagtcctgtgatccgttttagagctagaaatagcaagttaaaataaggctagtccgttatcaacttgaaaaagtggcaccgagtcggtgcgcgccgttgcggccgcgcccgttcacaggact

SEQ ID NO: 753 - RNA, 136 nt, synthetic construct
  source 1..136: mol_type = other RNA
cagctccagtcctgtgatccgttttagagctagaaatagcaagttaaaataaggctagtccgttatcaacttgaaaaagtggcaccgagtcggtgctggaccgccacaggcttggccctagctcgctcacaggact

SEQ ID NO: 754 - RNA, 141 nt, synthetic construct
  source 1..141: mol_type = other RNA
cagctccagtcctgtgatccgttttagagctagaaatagcaagttaaaataaggctagtccgttatcaacttgaaaaagtggcaccgagtcggtgctgtgggacgttacattgagtattgagcgcgcacgttcacaggact

SEQ ID NO: 755 - RNA, 128 nt, synthetic construct
  source 1..128: mol_type = other RNA
cagctccagtcctgtgatccgttttagagctagaaatagcaagttaaaataaggctagtccgttatcaacttgaaaaagtggcaccgagtcggtgcgccccgggcgactggcactcgctcacaggact

SEQ ID NO: 756 - RNA, 136 nt, synthetic construct
  source 1..136: mol_type = other RNA
cagctccagtcctgtgatccgttttagagctagaaatagcaagttaaaataaggctagtccgttatcaacttgaaaaagtggcaccgagtcggtgccccgggtggtggccgcgccggtcagcgcgctcacaggact

SEQ ID NO: 757 - RNA, 136 nt, synthetic construct
  source 1..136: mol_type = other RNA
cagctccagtcctgtgatccgttttagagctagaaatagcaagttaaaataaggctagtccgttatcaacttgaaaaagtggcaccgagtcggtgccgaggtagaggcgaggagtagacgccgcgctcacaggact

SEQ ID NO: 758 - RNA, 126 nt, synthetic construct
  source 1..126: mol_type = other RNA
cagctccagtcctgtgatccgttttagagctagaaatagcaagttaaaataaggctagtccgttatcaacttgaaaaagtggcaccgagtcggtgcgatctaagaactgtctccgctcacaggact

SEQ ID NO: 759 - RNA, 121 nt, synthetic construct
  source 1..121: mol_type = other RNA
cagctccagtcctgtgatccgttttagagctagaaatagcaagttaaaataaggctagtccgttatcaacttgaaaaagtggcaccgagtcggtgctcgtgttcaatccgctcacaggact

SEQ ID NO: 760 - RNA, 121 nt, synthetic construct
  source 1..121: mol_type = other RNA
cagctccagtcctgtgatccgttttagagctagaaatagcaagttaaaataaggctagtccgttatcaacttgaaaaagtggcaccgagtcggtgcggacattcttgccgctcacaggact

SEQ ID NO: 761 - RNA, 146 nt, synthetic construct
  source 1..146: mol_type = other RNA
cagctccagtcctgtgatccgttttagagctagaaatagcaagttaaaataaggctagtccgttatcaacttgaaaaagtggcaccgagtcggtgcggtcctggtgacgacggggtgagagcgaacttaaggccgctcacaggact

SEQ ID NO: 762 - RNA, 124 nt, synthetic construct
  source 1..124: mol_type = other RNA
cagctccagtcctgtgatccgttttagagctagaaatagcaagttaaaataaggctagtccgttatcaacttgaaaaagtggcaccgagtcggtgcagcccgcgcgttacacgctcacaggact

SEQ ID NO: 763 - RNA, 124 nt, synthetic construct
  source 1..124: mol_type = other RNA
cagctccagtcctgtgatccgttttagagctagaaatagcaagttaaaataaggctagtccgttatcaacttgaaaaagtggcaccgagtcggtgcgaacactccggccgtagctcacaggact

SEQ ID NO: 764 - RNA, 136 nt, synthetic construct
  source 1..136: mol_type = other RNA
cagctccagtcctgtgatccgttttagagctagaaatagcaagttaaaataaggctagtccgttatcaacttgaaaaagtggcaccgagtcggtgcccggtcgtccgttcagagaccatgcggagctcacaggact

SEQ ID NO: 765 - RNA, 141 nt, synthetic construct
  source 1..141: mol_type = other RNA
cagctccagtcctgtgatccgttttagagctagaaatagcaagttaaaataaggctagtccgttatcaacttgaaaaagtggcaccgagtcggtgcgcgcccagaagtggggaagccgctgccaagagagctcacaggact

SEQ ID NO: 766 - RNA, 136 nt, synthetic construct
  source 1..136: mol_type = other RNA
cagctccagtcctgtgatccgttttagagctagaaatagcaagttaaaataaggctagtccgttatcaacttgaaaaagtggcaccgagtcggtgcctcgctctaagatttagccgctgaaagagctcacaggact

SEQ ID NO: 767 - RNA, 141 nt, synthetic construct
  source 1..141: mol_type = other RNA
cagctccagtcctgtgatccgttttagagctagaaatagcaagttaaaataaggctagtccgttatcaacttgaaaaagtggcaccgagtcggtgcatggggccttaacgacccgcgccccgcctctcagttcacaggact

SEQ ID NO: 768 - RNA, 121 nt, synthetic construct
  source 1..121: mol_type = other RNA
cagctccagtcctgtgatccgttttagagctagaaatagcaagttaaaataaggctagtccgttatcaacttgaaaaagtggcaccgagtcggtgcatgtacgggccgtcctcacaggact

SEQ ID NO: 769 - RNA, 126 nt, synthetic construct
  source 1..126: mol_type = other RNA
cagctccagtcctgtgatccgttttagagctagaaatagcaagttaaaataaggctagtccgttatcaacttgaaaaagtggcaccgagtcggtgcacgccatggagggatagtcctcacaggact

SEQ ID NO: 770 - RNA, 131 nt, synthetic construct
  source 1..131: mol_type = other RNA
cagctccagtcctgtgatccgttttagagctagaaatagcaagttaaaataaggctagtccgttatcaacttgaaaaagtggcaccgagtcggtgcgtcgctgatttcggtgcgagcctcctcacaggact

SEQ ID NO: 771 - RNA, 126 nt, synthetic construct
  source 1..126: mol_type = other RNA
cagctccagtcctgtgatccgttttagagctagaaatagcaagttaaaataaggctagtccgttatcaacttgaaaaagtggcaccgagtcggtgcctgcccctgagggacgatcctcacaggact

SEQ ID NO: 772 - RNA, 134 nt, synthetic construct
  source 1..134: mol_type = other RNA
cagctccagtcctgtgatccgttttagagctagaaatagcaagttaaaataaggctagtccgttatcaacttgaaaaagtggcaccgagtcggtgcgcaccgaagcgcggtccaatggacatcctcacaggact

SEQ ID NO: 773 - RNA, 136 nt, synthetic construct
  source 1..136: mol_type = other RNA
cagctccagtcctgtgatccgttttagagctagaaatagcaagttaaaataaggctagtccgttatcaacttgaaaaagtggcaccgagtcggtgctccaaggccaccccgcgggtaccggaatcctcacaggact

SEQ ID NO: 774 - RNA, 124 nt, synthetic construct
  source 1..124: mol_type = other RNA
cagctccagtcctgtgatccgttttagagctagaaatagcaagttaaaataaggctagtccgttatcaacttgaaaaagtggcaccgagtcggtgccgcgcacgccggggtgcctcacaggact

SEQ ID NO: 775 - RNA, 134 nt, synthetic construct
  source 1..134: mol_type = other RNA
cagctccagtcctgtgatccgttttagagctagaaatagcaagttaaaataaggctagtccgttatcaacttgaaaaagtggcaccgagtcggtgcccgcgtggggtggcggtgccccggtgcctcacaggact

SEQ ID NO: 776 - RNA, 131 nt, synthetic construct
  source 1..131: mol_type = other RNA
cagctccagtcctgtgatccgttttagagctagaaatagcaagttaaaataaggctagtccgttatcaacttgaaaaagtggcaccgagtcggtgcctcacgggtccccgagcccgctgcctcacaggact

SEQ ID NO: 777 - RNA, 141 nt, synthetic construct
  source 1..141: mol_type = other RNA
cagctccagtcctgtgatccgttttagagctagaaatagcaagttaaaataaggctagtccgttatcaacttgaaaaagtggcaccgagtcggtgccgcccggcccgttgaacgggtcactggcatcggcctcacaggact

SEQ ID NO: 778 - RNA, 134 nt, synthetic construct
  source 1..134: mol_type = other RNA
cagctccagtcctgtgatccgttttagagctagaaatagcaagttaaaataaggctagtccgttatcaacttgaaaaagtggcaccgagtcggtgcgcgcaccggagcggaggcagggccggcctcacaggact

SEQ ID NO: 779 - RNA, 131 nt, synthetic construct
  source 1..131: mol_type = other RNA
cagctccagtcctgtgatccgttttagagctagaaatagcaagttaaaataaggctagtccgttatcaacttgaaaaagtggcaccgagtcggtgccccgggcgccccgcgaggcccggcctcacaggact

SEQ ID NO: 780 - RNA, 136 nt, synthetic construct
  source 1..136: mol_type = other RNA
cagctccagtcctgtgatccgttttagagctagaaatagcaagttaaaataaggctagtccgttatcaacttgaaaaagtggcaccgagtcggtgcgccggccgcaccgggccgcgacgcccggcctcacaggact

SEQ ID NO: 781 - RNA, 136 nt, synthetic construct
  source 1..136: mol_type = other RNA
cagctccagtcctgtgatccgttttagagctagaaatagcaagttaaaataaggctagtccgttatcaacttgaaaaagtggcaccgagtcggtgcggcccaggcccgggctcccaggccggcgcctcacaggact

SEQ ID NO: 782 - RNA, 134 nt, synthetic construct
  source 1..134: mol_type = other RNA
cagctccagtcctgtgatccgttttagagctagaaatagcaagttaaaataaggctagtccgttatcaacttgaaaaagtggcaccgagtcggtgcccccgtcgtacgggccgctcccgccgcctcacaggact

SEQ ID NO: 783 - RNA, 124 nt, synthetic construct
  source 1..124: mol_type = other RNA
cagctccagtcctgtgatccgttttagagctagaaatagcaagttaaaataaggctagtccgttatcaacttgaaaaagtggcaccgagtcggtgccccgcgcgaggaggagcctcacaggact

SEQ ID NO: 784 - RNA, 144 nt, synthetic construct
  source 1..144: mol_type = other RNA
cagctccagtcctgtgatccgttttagagctagaaatagcaagttaaaataaggctagtccgttatcaacttgaaaaagtggcaccgagtcggtgcatgatcctgacgacggagaccgccgtcgtcgacaagcctcacaggact

SEQ ID NO: 785 - RNA, 128 nt, synthetic construct
  source 1..128: mol_type = other RNA
cagctccagtcctgtgatccgttttagagctagaaatagcaagttaaaataaggctagtccgttatcaacttgaaaaagtggcaccgagtcggtgcccaggtggtaccatatggtccctcacaggact

SEQ ID NO: 786 - RNA, 121 nt, synthetic construct
  source 1..121: mol_type = other RNA
cagctccagtcctgtgatccgttttagagctagaaatagcaagttaaaataaggctagtccgttatcaacttgaaaaagtggcaccgagtcggtgcacctttggccgttcttcacaggact

SEQ ID NO: 787 - RNA, 126 nt, synthetic construct
  source 1..126: mol_type = other RNA
cagctccagtcctgtgatccgttttagagctagaaatagcaagttaaaataaggctagtccgttatcaacttgaaaaagtggcaccgagtcggtgcctccgccctagtgtagtccctcacaggact

SEQ ID NO: 788 - RNA, 131 nt, synthetic construct
  source 1..131: mol_type = other RNA
cagctccagtcctgtgatccgttttagagctagaaatagcaagttaaaataaggctagtccgttatcaacttgaaaaagtggcaccgagtcggtgccgtggccgtaggtccggttcggccctcacaggact

SEQ ID NO: 789 - RNA, 131 nt, synthetic construct
  source 1..131: mol_type = other RNA
cagctccagtcctgtgatccgttttagagctagaaatagcaagttaaaataaggctagtccgttatcaacttgaaaaagtggcaccgagtcggtgcgtggtgacggaggctcccacggccctcacaggact

SEQ ID NO: 790 - RNA, 126 nt, synthetic construct
  source 1..126: mol_type = other RNA
cagctccagtcctgtgatccgttttagagctagaaatagcaagttaaaataaggctagtccgttatcaacttgaaaaagtggcaccgagtcggtgccgggccgccgatgtgcgccctcacaggact

SEQ ID NO: 791 - RNA, 124 nt, synthetic construct
  source 1..124: mol_type = other RNA
cagctccagtcctgtgatccgttttagagctagaaatagcaagttaaaataaggctagtccgttatcaacttgaaaaagtggcaccgagtcggtgcgctccccagtggccgccctcacaggact

SEQ ID NO: 792 - RNA, 128 nt, synthetic construct
  source 1..128: mol_type = other RNA
cagctccagtcctgtgatccgttttagagctagaaatagcaagttaaaataaggctagtccgttatcaacttgaaaaagtggcaccgagtcggtgccctaggcgggtcggagggcccctcacaggact

SEQ ID NO: 793 - RNA, 128 nt, synthetic construct
  source 1..128: mol_type = other RNA
cagctccagtcctgtgatccgttttagagctagaaatagcaagttaaaataaggctagtccgttatcaacttgaaaaagtggcaccgagtcggtgcaggatgggtagaataacgaccctcacaggact

SEQ ID NO: 794 - RNA, 141 nt, synthetic construct
  source 1..141: mol_type = other RNA
cagctccagtcctgtgatccgttttagagctagaaatagcaagttaaaataaggctagtccgttatcaacttgaaaaagtggcaccgagtcggtgccgcatgtcccgcctctacccaggaagatggcaccctcacaggact

SEQ ID NO: 795 - RNA, 116 nt, synthetic construct
  source 1..116: mol_type = other RNA
cagctccagtcctgtgatccgttttagagctagaaatagcaagttaaaataaggctagtccgttatcaacttgaaaaagtggcaccgagtcggtgcagcggggacctcacaggact

SEQ ID NO: 796 - RNA, 116 nt, synthetic construct
  source 1..116: mol_type = other RNA
cagctccagtcctgtgatccgttttagagctagaaatagcaagttaaaataaggctagtccgttatcaacttgaaaaagtggcaccgagtcggtgcctgcggcacctcacaggact

SEQ ID NO: 797 - RNA, 146 nt, synthetic construct
  source 1..146: mol_type = other RNA
cagctccagtcctgtgatccgttttagagctagaaatagcaagttaaaataaggctagtccgttatcaacttgaaaaagtggcaccgagtcggtgccctcctcacctttgccagagggacttcgcttgggaacacctcacaggact

SEQ ID NO: 798 - RNA, 136 nt, synthetic construct
  source 1..136: mol_type = other RNA
cagctccagtcctgtgatccgttttagagctagaaatagcaagttaaaataaggctagtccgttatcaacttgaaaaagtggcaccgagtcggtgccaagttgtgcccctagtgagcttggattactcacaggact

SEQ ID NO: 799 - RNA, 124 nt, synthetic construct
  source 1..124: mol_type = other RNA
cagctccagtcctgtgatccgttttagagctagaaatagcaagttaaaataaggctagtccgttatcaacttgaaaaagtggcaccgagtcggtgcttgctctctgccatgtactcacaggact

SEQ ID NO: 800 - RNA, 121 nt, synthetic construct
  source 1..121: mol_type = other RNA
cagctccagtcctgtgatccgttttagagctagaaatagcaagttaaaataaggctagtccgttatcaacttgaaaaagtggcaccgagtcggtgcggcaattaaccatactcacaggact

SEQ ID NO: 801 - RNA, 126 nt, synthetic construct
  source 1..126: mol_type = other RNA
cagctccagtcctgtgatccgttttagagctagaaatagcaagttaaaataaggctagtccgttatcaacttgaaaaagtggcaccgagtcggtgctgtggcccgcgctccggcactcacaggact

SEQ ID NO: 802 - RNA, 121 nt, synthetic construct
  source 1..121: mol_type = other RNA
cagctccagtcctgtgatccgttttagagctagaaatagcaagttaaaataaggctagtccgttatcaacttgaaaaagtggcaccgagtcggtgcctcgagtcggaccactcacaggact

SEQ ID NO: 803 - RNA, 136 nt, synthetic construct
  source 1..136: mol_type = other RNA
cagctccagtcctgtgatccgttttagagctagaaatagcaagttaaaataaggctagtccgttatcaacttgaaaaagtggcaccgagtcggtgcggtaacgtaatacaaggaaacatgagacactcacaggact

SEQ ID NO: 804 - RNA, 131 nt, synthetic construct
  source 1..131: mol_type = other RNA
cagctccagtcctgtgatccgttttagagctagaaatagcaagttaaaataaggctagtccgttatcaacttgaaaaagtggcaccgagtcggtgctgcgtattcctagatagctccacactcacaggact

SEQ ID NO: 805 - RNA, 141 nt, synthetic construct
  source 1..141: mol_type = other RNA
cagctccagtcctgtgatccgttttagagctagaaatagcaagttaaaataaggctagtccgttatcaacttgaaaaagtggcaccgagtcggtgcaccgttaccgccgaacgacctcgcgggctcaacactcacaggact

SEQ ID NO: 806 - RNA, 116 nt, synthetic construct
  source 1..116: mol_type = other RNA
cagctccagtcctgtgatccgttttagagctagaaatagcaagttaaaataaggctagtccgttatcaacttgaaaaagtggcaccgagtcggtgccatagctgcttcacaggact

SEQ ID NO: 807 - RNA, 124 nt, synthetic construct
  source 1..124: mol_type = other RNA
cagctccagtcctgtgatccgttttagagctagaaatagcaagttaaaataaggctagtccgttatcaacttgaaaaagtggcaccgagtcggtgctaagtcaaatgagacttttcacaggact

SEQ ID NO: 808 - RNA, 141 nt, synthetic construct
  source 1..141: mol_type = other RNA
cagctccagtcctgtgatccgttttagagctagaaatagcaagttaaaataaggctagtccgttatcaacttgaaaaagtggcaccgagtcggtgccgcagtcacagggagtcgcgaccgttgctgcattatcacaggact

SEQ ID NO: 809 - RNA, 124 nt, synthetic construct
  source 1..124: mol_type = other RNA
cagctccagtcctgtgatccgttttagagctagaaatagcaagttaaaataaggctagtccgttatcaacttgaaaaagtggcaccgagtcggtgcggacgcggacgccgggtatcacaggact

SEQ ID NO: 810 - RNA, 141 nt, synthetic construct
  source 1..141: mol_type = other RNA
cagctccagtcctgtgatccgttttagagctagaaatagcaagttaaaataaggctagtccgttatcaacttgaaaaagtggcaccgagtcggtgccccctaggtagccagaagggcgaaaccacgtgctatcacaggact

SEQ ID NO: 811 - RNA, 134 nt, synthetic construct
  source 1..134: mol_type = other RNA
cagctccagtcctgtgatccgttttagagctagaaatagcaagttaaaataaggctagtccgttatcaacttgaaaaagtggcaccgagtcggtgcacgccctcgagcacccaggcgacccctatcacaggact

SEQ ID NO: 812 - RNA, 134 nt, synthetic construct
  source 1..134: mol_type = other RNA
cagctccagtcctgtgatccgttttagagctagaaatagcaagttaaaataaggctagtccgttatcaacttgaaaaagtggcaccgagtcggtgctctgcaacgatggaatcaacacactatatcacaggact

SEQ ID NO: 813 - RNA, 126 nt, synthetic construct
  source 1..126: mol_type = other RNA
cagctccagtcctgtgatccgttttagagctagaaatagcaagttaaaataaggctagtccgttatcaacttgaaaaagtggcaccgagtcggtgcgtatcggggtaatgcatatatcacaggact

SEQ ID NO: 814 - RNA, 141 nt, synthetic construct
  source 1..141: mol_type = other RNA
cagctccagtcctgtgatccgttttagagctagaaatagcaagttaaaataaggctagtccgttatcaacttgaaaaagtggcaccgagtcggtgcttctcaaagagactttgttaagggtaccgctgatatcacaggact

SEQ ID NO: 815 - RNA, 136 nt, synthetic construct
  source 1..136: mol_type = other RNA
cagctccagtcctgtgatccgttttagagctagaaatagcaagttaaaataaggctagtccgttatcaacttgaaaaagtggcaccgagtcggtgccactattacaggaaattgagtaactgggcttcacaggact

SEQ ID NO: 816 - RNA, 124 nt, synthetic construct
  source 1..124: mol_type = other RNA
cagctccagtcctgtgatccgttttagagctagaaatagcaagttaaaataaggctagtccgttatcaacttgaaaaagtggcaccgagtcggtgcttctacgccggtttctgatcacaggact

SEQ ID NO: 817 - RNA, 128 nt, synthetic construct
  source 1..128: mol_type = other RNA
cagctccagtcctgtgatccgttttagagctagaaatagcaagttaaaataaggctagtccgttatcaacttgaaaaagtggcaccgagtcggtgcttggagtttgctctgtgtatgatcacaggact

SEQ ID NO: 818 - RNA, 141 nt, synthetic construct
  source 1..141: mol_type = other RNA
cagctccagtcctgtgatccgttttagagctagaaatagcaagttaaaataaggctagtccgttatcaacttgaaaaagtggcaccgagtcggtgcgaccgccgtagagtacaatgactcacgcggctcgatcacaggact

SEQ ID NO: 819 - RNA, 136 nt, synthetic construct
  source 1..136: mol_type = other RNA
cagctccagtcctgtgatccgttttagagctagaaatagcaagttaaaataaggctagtccgttatcaacttgaaaaagtggcaccgagtcggtgccggcggatcgcgcccctggcgcggggccgatcacaggact

SEQ ID NO: 820 - RNA, 121 nt, synthetic construct
  source 1..121: mol_type = other RNA
cagctccagtcctgtgatccgttttagagctagaaatagcaagttaaaataaggctagtccgttatcaacttgaaaaagtggcaccgagtcggtgctgcacgcggggccgatcacaggact

SEQ ID NO: 821 - RNA, 141 nt, synthetic construct
  source 1..141: mol_type = other RNA
cagctccagtcctgtgatccgttttagagctagaaatagcaagttaaaataaggctagtccgttatcaacttgaaaaagtggcaccgagtcggtgcgtcggcctgcacgccggccacgcccggggcgccgatcacaggact

SEQ ID NO: 822 - RNA, 134 nt, synthetic construct
  source 1..134: mol_type = other RNA
cagctccagtcctgtgatccgttttagagctagaaatagcaagttaaaataaggctagtccgttatcaacttgaaaaagtggcaccgagtcggtgcaagccctgcgcagcggtccgtccgccgatcacaggact

SEQ ID NO: 823 - RNA, 126 nt, synthetic construct
  source 1..126: mol_type = other RNA
cagctccagtcctgtgatccgttttagagctagaaatagcaagttaaaataaggctagtccgttatcaacttgaaaaagtggcaccgagtcggtgcgcctggccgggcctcaccgatcacaggact

SEQ ID NO: 824 - RNA, 129 nt, synthetic construct
  source 1..129: mol_type = other RNA
cagctccagtcctgtgatccgttttagagctagaaatagcaagttaaaataaggctagtccgttatcaacttgaaaaagtggcaccgagtcggtgcgggtctgatgcccgagaccacgatcacaggact

SEQ ID NO: 825 - RNA, 121 nt, synthetic construct
  source 1..121: mol_type = other RNA
cagctccagtcctgtgatccgttttagagctagaaatagcaagttaaaataaggctagtccgttatcaacttgaaaaagtggcaccgagtcggtgctgccgcacggcggcttcacaggact

SEQ ID NO: 826 - RNA, 128 nt, synthetic construct
  source 1..128: mol_type = other RNA
cagctccagtcctgtgatccgttttagagctagaaatagcaagttaaaataaggctagtccgttatcaacttgaaaaagtggcaccgagtcggtgcaggaacatcaagtgctagaagatcacaggact

SEQ ID NO: 827 - RNA, 128 nt, synthetic construct
  source 1..128: mol_type = other RNA
cagctccagtcctgtgatccgttttagagctagaaatagcaagttaaaataaggctagtccgttatcaacttgaaaaagtggcaccgagtcggtgcgcctcgcgggcggcccgggtcatcacaggact

SEQ ID NO: 828 - RNA, 126 nt, synthetic construct
  source 1..126: mol_type = other RNA
cagctccagtcctgtgatccgttttagagctagaaatagcaagttaaaataaggctagtccgttatcaacttgaaaaagtggcaccgagtcggtgcacgggacatttgttatctcatcacaggact

SEQ ID NO: 829 - RNA, 141 nt, synthetic construct
  source 1..141: mol_type = other RNA
cagctccagtcctgtgatccgttttagagctagaaatagcaagttaaaataaggctagtccgttatcaacttgaaaaagtggcaccgagtcggtgcggatggctaattatctgtttacccgtcacaaatcatcacaggact

SEQ ID NO: 830 - RNA, 134 nt, synthetic construct
  source 1..134: mol_type = other RNA
cagctccagtcctgtgatccgttttagagctagaaatagcaagttaaaataaggctagtccgttatcaacttgaaaaagtggcaccgagtcggtgcccaggacaaggaacgattgaatggtgcatcacaggact

SEQ ID NO: 831 - RNA, 136 nt, synthetic construct
  source 1..136: mol_type = other RNA
cagctccagtcctgtgatccgttttagagctagaaatagcaagttaaaataaggctagtccgttatcaacttgaaaaagtggcaccgagtcggtgcgcccacccgtccggcggacggcctcctgcatcacaggact

SEQ ID NO: 832 - RNA, 144 nt, synthetic construct
  source 1..144: mol_type = other RNA
cagctccagtcctgtgatccgttttagagctagaaatagcaagttaaaataaggctagtccgttatcaacttgaaaaagtggcaccgagtcggtgcggatgaggccgaggcaggcagcatcggaccatcatgcatcacaggact

SEQ ID NO: 833 - RNA, 128 nt, synthetic construct
  source 1..128: mol_type = other RNA
cagctccagtcctgtgatccgttttagagctagaaatagcaagttaaaataaggctagtccgttatcaacttgaaaaagtggcaccgagtcggtgctttccggcgcgcagatcgggcatcacaggact

SEQ ID NO: 834 - RNA, 126 nt, synthetic construct
  source 1..126: mol_type = other RNA
cagctccagtcctgtgatccgttttagagctagaaatagcaagttaaaataaggctagtccgttatcaacttgaaaaagtggcaccgagtcggtgccgccccgcggggcgctcgcatcacaggact

SEQ ID NO: 835 - RNA, 121 nt, synthetic construct
  source 1..121: mol_type = other RNA
cagctccagtcctgtgatccgttttagagctagaaatagcaagttaaaataaggctagtccgttatcaacttgaaaaagtggcaccgagtcggtgcgagcccagcatagcatcacaggact

SEQ ID NO: 836 - RNA, 134 nt, synthetic construct
  source 1..134: mol_type = other RNA
cagctccagtcctgtgatccgttttagagctagaaatagcaagttaaaataaggctagtccgttatcaacttgaaaaagtggcaccgagtcggtgcggcctgtggctacgggcggcgggcagcatcacaggact

SEQ ID NO: 837 - RNA, 128 nt, synthetic construct
  source 1..128: mol_type = other RNA
cagctccagtcctgtgatccgttttagagctagaaatagcaagttaaaataaggctagtccgttatcaacttgaaaaagtggcaccgagtcggtgcactatacggaccgagtccgccatcacaggact

SEQ ID NO: 838 - RNA, 121 nt, synthetic construct
  source 1..121: mol_type = other RNA
cagctccagtcctgtgatccgttttagagctagaaatagcaagttaaaataaggctagtccgttatcaacttgaaaaagtggcaccgagtcggtgcgttacacaagtagcttcacaggact

SEQ ID NO: 839 - RNA, 121 nt, synthetic construct
  source 1..121: mol_type = other RNA
cagctccagtcctgtgatccgttttagagctagaaatagcaagttaaaataaggctagtccgttatcaacttgaaaaagtggcaccgagtcggtgcacgcgcgttaccccatcacaggact

SEQ ID NO: 840 - RNA, 141 nt, synthetic construct
  source 1..141: mol_type = other RNA
cagctccagtcctgtgatccgttttagagctagaaatagcaagttaaaataaggctagtccgttatcaacttgaaaaagtggcaccgagtcggtgctgttgacttaacgccatgacctggtgctgtcaccatcacaggact

SEQ ID NO: 841 - RNA, 131 nt, synthetic construct
  source 1..131: mol_type = other RNA
cagctccagtcctgtgatccgttttagagctagaaatagcaagttaaaataaggctagtccgttatcaacttgaaaaagtggcaccgagtcggtgcagttcgcttccatagcatttaaccatcacaggact

SEQ ID NO: 842 - RNA, 128 nt, synthetic construct
  source 1..128: mol_type = other RNA
cagctccagtcctgtgatccgttttagagctagaaatagcaagttaaaataaggctagtccgttatcaacttgaaaaagtggcaccgagtcggtgctatctaacaatgaagttgcacatcacaggact

SEQ ID NO: 843 - RNA, 116 nt, synthetic construct
  source 1..116: mol_type = other RNA
cagctccagtcctgtgatccgttttagagctagaaatagcaagttaaaataaggctagtccgttatcaacttgaaaaagtggcaccgagtcggtgcgggcctagcttcacaggact

SEQ ID NO: 844 - RNA, 131 nt, synthetic construct
  source 1..131: mol_type = other RNA
cagctccagtcctgtgatccgttttagagctagaaatagcaagttaaaataaggctagtccgttatcaacttgaaaaagtggcaccgagtcggtgcatgcgtccacgcgcccaggctgtaatcacaggact

SEQ ID NO: 845 - RNA, 128 nt, synthetic construct
  source 1..128: mol_type = other RNA
cagctccagtcctgtgatccgttttagagctagaaatagcaagttaaaataaggctagtccgttatcaacttgaaaaagtggcaccgagtcggtgcagtcataccacgcacatcataatcacaggact

SEQ ID NO: 846 - RNA, 146 nt, synthetic construct
  source 1..146: mol_type = other RNA
cagctccagtcctgtgatccgttttagagctagaaatagcaagttaaaataaggctagtccgttatcaacttgaaaaagtggcaccgagtcggtgctacttcttgaatgtaattaccaaatacgttagctatggaatcacaggact

SEQ ID NO: 847 - RNA, 141 nt, synthetic construct
  source 1..141: mol_type = other RNA
cagctccagtcctgtgatccgttttagagctagaaatagcaagttaaaataaggctagtccgttatcaacttgaaaaagtggcaccgagtcggtgccgccgcgggctgggcccgggcgcgggcgggcggaatcacaggact

SEQ ID NO: 848 - RNA, 126 nt, synthetic construct
  source 1..126: mol_type = other RNA
cagctccagtcctgtgatccgttttagagctagaaatagcaagttaaaataaggctagtccgttatcaacttgaaaaagtggcaccgagtcggtgcccggagggctccgaccggaatcacaggact

SEQ ID NO: 849 - RNA, 134 nt, synthetic construct
  source 1..134: mol_type = other RNA
cagctccagtcctgtgatccgttttagagctagaaatagcaagttaaaataaggctagtccgttatcaacttgaaaaagtggcaccgagtcggtgcatcaagcgacgcacgcgtgcctccagaatcacaggact

SEQ ID NO: 850 - RNA, 124 nt, synthetic construct
  source 1..124: mol_type = other RNA
cagctccagtcctgtgatccgttttagagctagaaatagcaagttaaaataaggctagtccgttatcaacttgaaaaagtggcaccgagtcggtgccggtccgcaccgcaagaatcacaggact

SEQ ID NO: 851 - RNA, 128 nt, synthetic construct
  source 1..128: mol_type = other RNA
cagctccagtcctgtgatccgttttagagctagaaatagcaagttaaaataaggctagtccgttatcaacttgaaaaagtggcaccgagtcggtgcgcggtatcacctacgacatcaatcacaggact

SEQ ID NO: 852 - RNA, 144 nt, synthetic construct
  source 1..144: mol_type = other RNA
cagctccagtcctgtgatccgttttagagctagaaatagcaagttaaaataaggctagtccgttatcaacttgaaaaagtggcaccgagtcggtgcttcgcccgggcccgtagagaaggctcggcgtgcggcaatcacaggact

SEQ ID NO: 853 - RNA, 116 nt, synthetic construct
  source 1..116: mol_type = other RNA
cagctccagtcctgtgatccgttttagagctagaaatagcaagttaaaataaggctagtccgttatcaacttgaaaaagtggcaccgagtcggtgcgcccctacaatcacaggact

SEQ ID NO: 854 - RNA, 146 nt, synthetic construct
  source 1..146: mol_type = other RNA
cagctccagtcctgtgatccgttttagagctagaaatagcaagttaaaataaggctagtccgttatcaacttgaaaaagtggcaccgagtcggtgccaatgttcgtataaccgtccctagtgtgtctgttactaaatcacaggact

SEQ ID NO: 855 - RNA, 134 nt, synthetic construct
  source 1..134: mol_type = other RNA
cagctccagtcctgtgatccgttttagagctagaaatagcaagttaaaataaggctagtccgttatcaacttgaaaaagtggcaccgagtcggtgccgcgaggacaacctttccaattcggaaatcacaggact

SEQ ID NO: 856 - RNA, 116 nt, synthetic construct
  source 1..116: mol_type = other RNA
cagctccagtcctgtgatccgttttagagctagaaatagcaagttaaaataaggctagtccgttatcaacttgaaaaagtggcaccgagtcggtgcgaagcggaaatcacaggact

SEQ ID NO: 857 - RNA, 141 nt, synthetic construct
  source 1..141: mol_type = other RNA
cagctccagtcctgtgatccgttttagagctagaaatagcaagttaaaataaggctagtccgttatcaacttgaaaaagtggcaccgagtcggtgctagatcaatttccgagatcactgtcatctcaagcttcacaggact

SEQ ID NO: 858 - RNA, 124 nt, synthetic construct
  source 1..124: mol_type = other RNA
cagctccagtcctgtgatccgttttagagctagaaatagcaagttaaaataaggctagtccgttatcaacttgaaaaagtggcaccgagtcggtgcaatttcaagatcctgccttcacaggact

SEQ ID NO: 859 - RNA, 124 nt, synthetic construct
  source 1..124: mol_type = other RNA
cagctccagtcctgtgatccgttttagagctagaaatagcaagttaaaataaggctagtccgttatcaacttgaaaaagtggcaccgagtcggtgcggcctggacgccaggccttcacaggact

SEQ ID NO: 860 - RNA, 121 nt, synthetic construct
  source 1..121: mol_type = other RNA
cagctccagtcctgtgatccgttttagagctagaaatagcaagttaaaataaggctagtccgttatcaacttgaaaaagtggcaccgagtcggtgcgtcacctacgcgccttcacaggact

SEQ ID NO: 861 - RNA, 124 nt, synthetic construct
  source 1..124: mol_type = other RNA
cagctccagtcctgtgatccgttttagagctagaaatagcaagttaaaataaggctagtccgttatcaacttgaaaaagtggcaccgagtcggtgctcggccggtcttccgccttcacaggact

SEQ ID NO: 862 - RNA, 128 nt, synthetic construct
  source 1..128: mol_type = other RNA
cagctccagtcctgtgatccgttttagagctagaaatagcaagttaaaataaggctagtccgttatcaacttgaaaaagtggcaccgagtcggtgcccgccggctcatcgaaccgccttcacaggact

SEQ ID NO: 863 - RNA, 131 nt, synthetic construct
  source 1..131: mol_type = other RNA
cagctccagtcctgtgatccgttttagagctagaaatagcaagttaaaataaggctagtccgttatcaacttgaaaaagtggcaccgagtcggtgcggagagaggcgggctctctttcctttcacaggact

SEQ ID NO: 864 - RNA, 121 nt, synthetic construct
  source 1..121: mol_type = other RNA
cagctccagtcctgtgatccgttttagagctagaaatagcaagttaaaataaggctagtccgttatcaacttgaaaaagtggcaccgagtcggtgccgggccaccgccctttcacaggact

SEQ ID NO: 865 - RNA, 131 nt, synthetic construct
  source 1..131: mol_type = other RNA
cagctccagtcctgtgatccgttttagagctagaaatagcaagttaaaataaggctagtccgttatcaacttgaaaaagtggcaccgagtcggtgcgcaaggtgtttgtgcaccttacctttcacaggact

SEQ ID NO: 866 - RNA, 131 nt, synthetic construct
  source 1..131: mol_type = other RNA
cagctccagtcctgtgatccgttttagagctagaaatagcaagttaaaataaggctagtccgttatcaacttgaaaaagtggcaccgagtcggtgctaaaggatcacatataggtcgtggttcacaggact

SEQ ID NO: 867 - RNA, 126 nt, synthetic construct
  source 1..126: mol_type = other RNA
cagctccagtcctgtgatccgttttagagctagaaatagcaagttaaaataaggctagtccgttatcaacttgaaaaagtggcaccgagtcggtgcgccggcggaagccggctggttcacaggact

SEQ ID NO: 868 - RNA, 136 nt, synthetic construct
  source 1..136: mol_type = other RNA
cagctccagtcctgtgatccgttttagagctagaaatagcaagttaaaataaggctagtccgttatcaacttgaaaaagtggcaccgagtcggtgcgccggggtatgggcacacgccccgcggggttcacaggact

SEQ ID NO: 869 - RNA, 131 nt, synthetic construct
  source 1..131: mol_type = other RNA
cagctccagtcctgtgatccgttttagagctagaaatagcaagttaaaataaggctagtccgttatcaacttgaaaaagtggcaccgagtcggtgcgggtgcggcgcaagggccgcctcgttcacaggact

SEQ ID NO: 870 - RNA, 121 nt, synthetic construct
  source 1..121: mol_type = other RNA
cagctccagtcctgtgatccgttttagagctagaaatagcaagttaaaataaggctagtccgttatcaacttgaaaaagtggcaccgagtcggtgcttgccctatcggcgttcacaggact

SEQ ID NO: 871 - RNA, 131 nt, synthetic construct
  source 1..131: mol_type = other RNA
cagctccagtcctgtgatccgttttagagctagaaatagcaagttaaaataaggctagtccgttatcaacttgaaaaagtggcaccgagtcggtgcggaggggagtacgcagcgccccagttcacaggact

SEQ ID NO: 872 - RNA, 126 nt, synthetic construct
  source 1..126: mol_type = other RNA
cagctccagtcctgtgatccgttttagagctagaaatagcaagttaaaataaggctagtccgttatcaacttgaaaaagtggcaccgagtcggtgcagctcagattatagtgagcttcacaggact

SEQ ID NO: 873 - RNA, 121 nt, synthetic construct
  source 1..121: mol_type = other RNA
cagctccagtcctgtgatccgttttagagctagaaatagcaagttaaaataaggctagtccgttatcaacttgaaaaagtggcaccgagtcggtgcacgaccgagggtccttcacaggact

SEQ ID NO: 874 - RNA, 121 nt, synthetic construct
  source 1..121: mol_type = other RNA
cagctccagtcctgtgatccgttttagagctagaaatagcaagttaaaataaggctagtccgttatcaacttgaaaaagtggcaccgagtcggtgcttgagcgatgcatattcacaggact

SEQ ID NO: 875 - RNA, 121 nt, synthetic construct
  source 1..121: mol_type = other RNA
cagctccagtcctgtgatccgttttagagctagaaatagcaagttaaaataaggctagtccgttatcaacttgaaaaagtggcaccgagtcggtgcagtaactacgcagattcacaggact

SEQ ID NO: 876 - RNA, 121 nt, synthetic construct
  source 1..121: mol_type = other RNA
cagctccagtcctgtgatccgttttagagctagaaatagcaagttaaaataaggctagtccgttatcaacttgaaaaagtggcaccgagtcggtgcttgccccattggcattcacaggact

SEQ ID NO: 877 - RNA, 136 nt, synthetic construct
  source 1..136: mol_type = other RNA
cagctccagtcctgtgatccgttttagagctagaaatagcaagttaaaataaggctagtccgttatcaacttgaaaaagtggcaccgagtcggtgctgtgcccgagggagaatcgaacacatgaattcacaggact

SEQ ID NO: 878 - RNA, 136 nt, synthetic construct
  source 1..136: mol_type = other RNA
cagctccagtcctgtgatccgttttagagctagaaatagcaagttaaaataaggctagtccgttatcaacttgaaaaagtggcaccgagtcggtgctgagcaagattctctctaatttcttcctggtcacaggact

SEQ ID NO: 879 - RNA, 136 nt, synthetic construct
  source 1..136: mol_type = other RNA
cagctccagtcctgtgatccgttttagagctagaaatagcaagttaaaataaggctagtccgttatcaacttgaaaaagtggcaccgagtcggtgcggagaccgagcgtgtgcgacgctcctgtcgtcacaggact

SEQ ID NO: 880 - RNA, 136 nt, synthetic construct
  source 1..136: mol_type = other RNA
cagctccagtcctgtgatccgttttagagctagaaatagcaagttaaaataaggctagtccgttatcaacttgaaaaagtggcaccgagtcggtgcaatcttgcatttgtcttagcaagatctccgtcacaggact

SEQ ID NO: 881 - RNA, 131 nt, synthetic construct
  source 1..131: mol_type = other RNA
cagctccagtcctgtgatccgttttagagctagaaatagcaagttaaaataaggctagtccgttatcaacttgaaaaagtggcaccgagtcggtgcctgaggggccgtgttgcgacccacgtcacaggact

SEQ ID NO: 882 - RNA, 131 nt, synthetic construct
  source 1..131: mol_type = other RNA
cagctccagtcctgtgatccgttttagagctagaaatagcaagttaaaataaggctagtccgttatcaacttgaaaaagtggcaccgagtcggtgctagggaagagtcgaatatatctctctcacaggact

SEQ ID NO: 883 - RNA, 121 nt, synthetic construct
  source 1..121: mol_type = other RNA
cagctccagtcctgtgatccgttttagagctagaaatagcaagttaaaataaggctagtccgttatcaacttgaaaaagtggcaccgagtcggtgcctgtgcatcgcactctcacaggact

SEQ ID NO: 884 - RNA, 131 nt, synthetic construct
  source 1..131: mol_type = other RNA
cagctccagtcctgtgatccgttttagagctagaaatagcaagttaaaataaggctagtccgttatcaacttgaaaaagtggcaccgagtcggtgcaggaaacggcgacctgaggtttcgctcacaggact

SEQ ID NO: 885 - RNA, 131 nt, synthetic construct
  source 1..131: mol_type = other RNA
cagctccagtcctgtgatccgttttagagctagaaatagcaagttaaaataaggctagtccgttatcaacttgaaaaagtggcaccgagtcggtgcggaagcggagactctatgcttcgcctcacaggact

SEQ ID NO: 886 - RNA, 126 nt, synthetic construct
  source 1..126: mol_type = other RNA
cagctccagtcctgtgatccgttttagagctagaaatagcaagttaaaataaggctagtccgttatcaacttgaaaaagtggcaccgagtcggtgcaaaggggacaccggggtccctcacaggact

SEQ ID NO: 887 - RNA, 136 nt, synthetic construct
  source 1..136: mol_type = other RNA
cagctccagtcctgtgatccgttttagagctagaaatagcaagttaaaataaggctagtccgttatcaacttgaaaaagtggcaccgagtcggtgcggcgccgaaggtcccaggtggaccgggccctcacaggact

SEQ ID NO: 888 - RNA, 126 nt, synthetic construct
  source 1..126: mol_type = other RNA
cagctccagtcctgtgatccgttttagagctagaaatagcaagttaaaataaggctagtccgttatcaacttgaaaaagtggcaccgagtcggtgcaggtcgcctgtgcgcgcccctcacaggact

SEQ ID NO: 889 - RNA, 126 nt, synthetic construct
  source 1..126: mol_type = other RNA
cagctccagtcctgtgatccgttttagagctagaaatagcaagttaaaataaggctagtccgttatcaacttgaaaaagtggcaccgagtcggtgcaggtgcacacagttgcgacctcacaggact

SEQ ID NO: 890 - RNA, 121 nt, synthetic construct
  source 1..121: mol_type = other RNA
cagctccagtcctgtgatccgttttagagctagaaatagcaagttaaaataaggctagtccgttatcaacttgaaaaagtggcaccgagtcggtgcaggtcactcccgacctcacaggact

SEQ ID NO: 891 - RNA, 121 nt, synthetic construct
  source 1..121: mol_type = other RNA
cagctccagtcctgtgatccgttttagagctagaaatagcaagttaaaataaggctagtccgttatcaacttgaaaaagtggcaccgagtcggtgcgcgccacaggcgcactcacaggact

SEQ ID NO: 892 - RNA, 131 nt, synthetic construct
  source 1..131: mol_type = other RNA
cagctccagtcctgtgatccgttttagagctagaaatagcaagttaaaataaggctagtccgttatcaacttgaaaaagtggcaccgagtcggtgcgtcagctctatatttcctgacttgatcacaggact

SEQ ID NO: 893 - RNA, 131 nt, synthetic construct
  source 1..131: mol_type = other RNA
cagctccagtcctgtgatccgttttagagctagaaatagcaagttaaaataaggctagtccgttatcaacttgaaaaagtggcaccgagtcggtgccttagggtctcagtaacccacttcatcacaggact

SEQ ID NO: 894 - RNA, 121 nt, synthetic construct
  source 1..121: mol_type = other RNA
cagctccagtcctgtgatccgttttagagctagaaatagcaagttaaaataaggctagtccgttatcaacttgaaaaagtggcaccgagtcggtgctgtagctatggatcatcacaggact

SEQ ID NO: 895 - RNA, 126 nt, synthetic construct
  source 1..126: mol_type = other RNA
cagctccagtcctgtgatccgttttagagctagaaatagcaagttaaaataaggctagtccgttatcaacttgaaaaagtggcaccgagtcggtgcaggtggctacaattgccacatcacaggact

SEQ ID NO: 896 - RNA, 126 nt, synthetic construct
  source 1..126: mol_type = other RNA
cagctccagtcctgtgatccgttttagagctagaaatagcaagttaaaataaggctagtccgttatcaacttgaaaaagtggcaccgagtcggtgcagtagctgtacccaactaaatcacaggact

SEQ ID NO: 897 - RNA, 118 nt, synthetic construct
  source 1..118: mol_type = other RNA
cagctccagtcctgtgatccgttttagagctagaaatagcaagttaaaataaggctagtccgttatcaacttgaaaaagtggcaccgagtcggtgcacgctccccagatcacaggact

SEQ ID NO: 898 - RNA, 120 nt, synthetic construct
  source 1..120: mol_type = other RNA
cagctccagtcctgtgatccgttttagagctagaaatagcaagttaaaataaggctagtccgttatcaacttgaaaaagtggcaccgagtcggtgcagacgctccccagatcacaggact

SEQ ID NO: 899 - RNA, 122 nt, synthetic construct
  source 1..122: mol_type = other RNA
cagctccagtcctgtgatccgttttagagctagaaatagcaagttaaaataaggctagtccgttatcaacttgaaaaagtggcaccgagtcggtgcccagacgctccccagatcacaggact

SEQ ID NO: 900 - RNA, 124 nt, synthetic construct
  source 1..124: mol_type = other RNA
cagctccagtcctgtgatccgttttagagctagaaatagcaagttaaaataaggctagtccgttatcaacttgaaaaagtggcaccgagtcggtgccgccagacgctccccagatcacaggact

SEQ ID NO: 901 - RNA, 126 nt, synthetic construct
  source 1..126: mol_type = other RNA
cagctccagtcctgtgatccgttttagagctagaaatagcaagttaaaataaggctagtccgttatcaacttgaaaaagtggcaccgagtcggtgccgcgccagacgctccccagatcacaggact

SEQ ID NO: 902 - RNA, 118 nt, synthetic construct
  source 1..118: mol_type = other RNA
cagctccagtcctgtgatccgttttagagctagaaatagcaagttaaaataaggctagtccgttatcaacttgaaaaagtggcaccgagtcggtgcccgaaaaagcggtcacaggact

SEQ ID NO: 903 - RNA, 120 nt, synthetic construct
  source 1..120: mol_type = other RNA
cagctccagtcctgtgatccgttttagagctagaaatagcaagttaaaataaggctagtccgttatcaacttgaaaaagtggcaccgagtcggtgcccccgaaaaagcggtcacaggact

SEQ ID NO: 904 - RNA, 122 nt, synthetic construct
  source 1..122: mol_type = other RNA
cagctccagtcctgtgatccgttttagagctagaaatagcaagttaaaataaggctagtccgttatcaacttgaaaaagtggcaccgagtcggtgcatccccgaaaaagcggtcacaggact

SEQ ID NO: 905 - RNA, 124 nt, synthetic construct
  source 1..124: mol_type = other RNA
cagctccagtcctgtgatccgttttagagctagaaatagcaagttaaaataaggctagtccgttatcaacttgaaaaagtggcaccgagtcggtgcggatccccgaaaaagcggtcacaggact

SEQ ID NO: 906 - RNA, 126 nt, synthetic construct
  source 1..126: mol_type = other RNA
cagctccagtcctgtgatccgttttagagctagaaatagcaagttaaaataaggctagtccgttatcaacttgaaaaagtggcaccgagtcggtgccgggatccccgaaaaagcggtcacaggact

SEQ ID NO: 907 - RNA, 118 nt, synthetic construct
  source 1..118: mol_type = other RNA
cagctccagtcctgtgatccgttttagagctagaaatagcaagttaaaataaggctagtccgttatcaacttgaaaaagtggcaccgagtcggtgctccaaaccgccgtcacaggact

SEQ ID NO: 908 - RNA, 120 nt, synthetic construct
  source 1..120: mol_type = other RNA
cagctccagtcctgtgatccgttttagagctagaaatagcaagttaaaataaggctagtccgttatcaacttgaaaaagtggcaccgagtcggtgctatccaaaccgccgtcacaggact

SEQ ID NO: 909 - RNA, 122 nt, synthetic construct
  source 1..122: mol_type = other RNA
cagctccagtcctgtgatccgttttagagctagaaatagcaagttaaaataaggctagtccgttatcaacttgaaaaagtggcaccgagtcggtgcaatatccaaaccgccgtcacaggact

SEQ ID NO: 910 - RNA, 124 nt, synthetic construct
  source 1..124: mol_type = other RNA
cagctccagtcctgtgatccgttttagagctagaaatagcaagttaaaataaggctagtccgttatcaacttgaaaaagtggcaccgagtcggtgctaaatatccaaaccgccgtcacaggact

SEQ ID NO: 911 - RNA, 126 nt, synthetic construct
  source 1..126: mol_type = other RNA
cagctccagtcctgtgatccgttttagagctagaaatagcaagttaaaataaggctagtccgttatcaacttgaaaaagtggcaccgagtcggtgcaataaatatccaaaccgccgtcacaggact

SEQ ID NO: 912 - RNA, 20 nt, synthetic construct
  source 1..20: mol_type = other RNA
ggccggcgaacggggctcga

SEQ ID NO: 913 - RNA, 17 nt, synthetic construct
  source 1..17: mol_type = other RNA
agccccgttcgccggcc

SEQ ID NO: 914 - RNA, 16 nt, synthetic construct
  source 1..16: mol_type = other RNA
agccccgttcgccggc

SEQ ID NO: 915 - RNA, 15 nt, synthetic construct
  source 1..15: mol_type = other RNA
agccccgttcgccgg

SEQ ID NO: 916 - RNA, 14 nt, synthetic construct
  source 1..14: mol_type = other RNA
agccccgttcgccg

SEQ ID NO: 917 - RNA, 13 nt, synthetic construct
  source 1..13: mol_type = other RNA
agccccgttcgcc

SEQ ID NO: 918 - RNA, 12 nt, synthetic construct
  source 1..12: mol_type = other RNA
agccccgttcgc

SEQ ID NO: 919 - RNA, 11 nt, synthetic construct
  source 1..11: mol_type = other RNA
agccccgttcg

SEQ ID NO: 920 - RNA, 10 nt, synthetic construct
  source 1..10: mol_type = other RNA
agccccgttc

SEQ ID NO: 921-927 - skipped (7 entries)

SEQ ID NO: 928 - RNA, 147 nt, synthetic construct
  source 1..147: mol_type = other RNA
ggccggcgaacggggctcgagttttagagctagaaatagcaagttaaaataaggctagtccgttatcaacttgaaaaagtggcaccgagtcggtgcggcttgtcgacgacggcggtctccgtcgtcaggatcatagccccgttcgcc

SEQ ID NO: 929 - RNA, 20 nt, synthetic construct
  source 1..20: mol_type = other RNA
accgcagtctggcgccgccc

SEQ ID NO: 930 - RNA, 17 nt, synthetic construct
  source 1..17: mol_type = other RNA
cggcgccagactgcggt

SEQ ID NO: 931 - RNA, 16 nt, synthetic construct
  source 1..16: mol_type = other RNA
cggcgccagactgcgg

SEQ ID NO: 932 - RNA, 15 nt, synthetic construct
  source 1..15: mol_type = other RNA
cggcgccagactgcg

SEQ ID NO: 933 - RNA, 14 nt, synthetic construct
  source 1..14: mol_type = other RNA
cggcgccagactgc

SEQ ID NO: 934 - RNA, 13 nt, synthetic construct
  source 1..13: mol_type = other RNA
cggcgccagactg

SEQ ID NO: 935 - RNA, 12 nt, synthetic construct
  source 1..12: mol_type = other RNA
cggcgccagact

SEQ ID NO: 936 - RNA, 11 nt, synthetic construct
  source 1..11: mol_type = other RNA
cggcgccagac

SEQ ID NO: 937 - RNA, 10 nt, synthetic construct
  source 1..10: mol_type = other RNA
cggcgccaga

SEQ ID NO: 938-944 - skipped (7 entries)

SEQ ID NO: 945 - RNA, 144 nt, synthetic construct
  source 1..144: mol_type = other RNA
accgcagtctggcgccgcccgttttagagctagaaatagcaagttaaaataaggctagtccgttatcaacttgaaaaagtggcaccgagtcggtgcggcttgtcgacgacggcggtctccgtcgtcaggatcatcggcgccaga

SEQ ID NO: 946 - RNA, 146 nt, synthetic construct
  source 1..146: mol_type = other RNA
accgcagtctggcgccgcccgttttagagctagaaatagcaagttaaaataaggctagtccgttatcaacttgaaaaagtggcaccgagtcggtgcggcttgtcgacgacggcggtctccgtcgtcaggatcatcggcgccagact

SEQ ID NO: 947 - RNA, 20 nt, synthetic construct
  source 1..20: mol_type = other RNA
cttcgactccggggccccgt

SEQ ID NO: 948 - RNA, 17 nt, synthetic construct
  source 1..17: mol_type = other RNA
gggccccggagtcgaag

SEQ ID NO: 949 - RNA, 16 nt, synthetic construct
  source 1..16: mol_type = other RNA
gggccccggagtcgaa

SEQ ID NO: 950 - RNA, 15 nt, synthetic construct
  source 1..15: mol_type = other RNA
gggccccggagtcga

SEQ ID NO: 951 - RNA, 14 nt, synthetic construct
  source 1..14: mol_type = other RNA
gggccccggagtcg

SEQ ID NO: 952 - RNA, 13 nt, synthetic construct
  source 1..13: mol_type = other RNA
gggccccggagtc

SEQ ID NO: 953 - RNA, 12 nt, synthetic construct
  source 1..12: mol_type = other RNA
gggccccggagt

SEQ ID NO: 954 - RNA, 11 nt, synthetic construct
  source 1..11: mol_type = other RNA
gggccccggag

SEQ ID NO: 955 - RNA, 10 nt, synthetic construct
  source 1..10: mol_type = other RNA
gggccccgga

SEQ ID NO: 956-962 - skipped (7 entries)

SEQ ID NO: 963 - RNA, 144 nt, synthetic construct
  source 1..144: mol_type = other RNA
cttcgactccggggccccgtgttttagagctagaaatagcaagttaaaataaggctagtccgttatcaacttgaaaaagtggcaccgagtcggtgcggcttgtcgacgacggcggtctccgtcgtcaggatcatgggccccgga

SEQ ID NO: 964 - RNA, 146 nt, synthetic construct
  source 1..146: mol_type = other RNA
cttcgactccggggccccgtgttttagagctagaaatagcaagttaaaataaggctagtccgttatcaacttgaaaaagtggcaccgagtcggtgcggcttgtcgacgacggcggtctccgtcgtcaggatcatgggccccggagt

SEQ ID NO: 965 - RNA, 20 nt, synthetic construct
  source 1..20: mol_type = other RNA
cgggcccgccccctagcggc

SEQ ID NO: 966 - RNA, 17 nt, synthetic construct
  source 1..17: mol_type = other RNA
gctagggggcgggcccg

SEQ ID NO: 967 - RNA, 16 nt, synthetic construct
  source 1..16: mol_type = other RNA
gctagggggcgggccc

SEQ ID NO: 968 - RNA, 15 nt, synthetic construct
  source 1..15: mol_type = other RNA
gctagggggcgggcc

SEQ ID NO: 969 - RNA, 14 nt, synthetic construct
  source 1..14: mol_type = other RNA
gctagggggcgggc

SEQ ID NO: 970 - RNA, 13 nt, synthetic construct
  source 1..13: mol_type = other RNA
gctagggggcggg

SEQ ID NO: 971 - RNA, 12 nt, synthetic construct
  source 1..12: mol_type = other RNA
gctagggggcgg

SEQ ID NO: 972 - RNA, 11 nt, synthetic construct
  source 1..11: mol_type = other RNA
gctagggggcg

SEQ ID NO: 973 - RNA, 10 nt, synthetic construct
  source 1..10: mol_type = other RNA
gctagggggc

SEQ ID NO: 974-980 - skipped (7 entries)

SEQ ID NO: 981 - RNA, 144 nt, synthetic construct
  source 1..144: mol_type = other RNA
cgggcccgccccctagcggcgttttagagctagaaatagcaagttaaaataaggctagtccgttatcaacttgaaaaagtggcaccgagtcggtgcggcttgtcgacgacggcggtctccgtcgtcaggatcatgctagggggc

SEQ ID NO: 982 - RNA, 146 nt, synthetic construct
  source 1..146: mol_type = other RNA
cgggcccgccccctagcggcgttttagagctagaaatagcaagttaaaataaggctagtccgttatcaacttgaaaaagtggcaccgagtcggtgcggcttgtcgacgacggcggtctccgtcgtcaggatcatgctagggggcgg

SEQ ID NO: 983 - RNA, 20 nt, synthetic construct
  source 1..20: mol_type = other RNA
ccctagcggccggggaggga

SEQ ID NO: 984 - RNA, 17 nt, synthetic construct
  source 1..17: mol_type = other RNA
ctccccggccgctaggg

SEQ ID NO: 985 - RNA, 16 nt, synthetic construct
  source 1..16: mol_type = other RNA
ctccccggccgctagg

SEQ ID NO: 986 - RNA, 15 nt, synthetic construct
  source 1..15: mol_type = other RNA
ctccccggccgctag

SEQ ID NO: 987 - RNA, 14 nt, synthetic construct
  source 1..14: mol_type = other RNA
ctccccggccgcta

SEQ ID NO: 988 - RNA, 13 nt, synthetic construct
  source 1..13: mol_type = other RNA
ctccccggccgct

SEQ ID NO: 989 - RNA, 12 nt, synthetic construct
  source 1..12: mol_type = other RNA
ctccccggccgc

SEQ ID NO: 990 - RNA, 11 nt, synthetic construct
  source 1..11: mol_type = other RNA
ctccccggccg

SEQ ID NO: 991 - RNA, 10 nt, synthetic construct
  source 1..10: mol_type = other RNA
ctccccggcc

SEQ ID NO: 992-998 - skipped (7 entries)

SEQ ID NO: 999 - RNA, 144 nt, synthetic construct
  source 1..144: mol_type = other RNA
ccctagcggccggggagggagttttagagctagaaatagcaagttaaaataaggctagtccgttatcaacttgaaaaagtggcaccgagtcggtgcggcttgtcgacgacggcggtctccgtcgtcaggatcatctccccggcc

SEQ ID NO: 1000 - RNA, 146 nt, synthetic construct
  source 1..146: mol_type = other RNA
ccctagcggccggggagggagttttagagctagaaatagcaagttaaaataaggctagtccgttatcaacttgaaaaagtggcaccgagtcggtgcggcttgtcgacgacggcggtctccgtcgtcaggatcatctccccggccgc

SEQ ID NO: 1001 - RNA, 20 nt, synthetic construct
  source 1..20: mol_type = other RNA
ggaggggccgggtccgcggc

SEQ ID NO: 1002 - RNA, 17 nt, synthetic construct
  source 1..17: mol_type = other RNA
gcggacccggcccctcc

SEQ ID NO: 1003 - RNA, 16 nt, synthetic construct
  source 1..16: mol_type = other RNA
gcggacccggcccctc

SEQ ID NO: 1004 - RNA, 15 nt, synthetic construct
  source 1..15: mol_type = other RNA
gcggacccggcccct

SEQ ID NO: 1005 - RNA, 14 nt, synthetic construct
  source 1..14: mol_type = other RNA
gcggacccggcccc

SEQ ID NO: 1006 - RNA, 13 nt, synthetic construct
  source 1..13: mol_type = other RNA
gcggacccggccc

SEQ ID NO: 1007 - RNA, 12 nt, synthetic construct
  source 1..12: mol_type = other RNA
gcggacccggcc

SEQ ID NO: 1008 - RNA, 11 nt, synthetic construct
  source 1..11: mol_type = other RNA
gcggacccggc

SEQ ID NO: 1009 - RNA, 10 nt, synthetic construct
  source 1..10: mol_type = other RNA
gcggacccgg

SEQ ID NO: 1010-1016 - skipped (7 entries)

SEQ ID NO: 1017 - RNA, 144 nt, synthetic construct
  source 1..144: mol_type = other RNA
ggaggggccgggtccgcggcgttttagagctagaaatagcaagttaaaataaggctagtccgttatcaacttgaaaaagtggcaccgagtcggtgcggcttgtcgacgacggcggtctccgtcgtcaggatcatgcggacccgg

SEQ ID NO: 1018 - RNA, 146 nt, synthetic construct
  source 1..146: mol_type = other RNA
ggaggggccgggtccgcggcgttttagagctagaaatagcaagttaaaataaggctagtccgttatcaacttgaaaaagtggcaccgagtcggtgcggcttgtcgacgacggcggtctccgtcgtcaggatcatgcggacccggcc

SEQ ID NO: 1019 - RNA, 20 nt, synthetic construct
  source 1..20: mol_type = other RNA
gggtccgcggccggcgaacg

SEQ ID NO: 1020 - RNA, 17 nt, synthetic construct
  source 1..17: mol_type = other RNA
tcgccggccgcggaccc

SEQ ID NO: 1021 - RNA, 16 nt, synthetic construct
  source 1..16: mol_type = other RNA
tcgccggccgcggacc

SEQ ID NO: 1022 - RNA, 15 nt, synthetic construct
  source 1..15: mol_type = other RNA
tcgccggccgcggac

SEQ ID NO: 1023 - RNA, 14 nt, synthetic construct
  source 1..14: mol_type = other RNA
tcgccggccgcgga

SEQ ID NO: 1024 - RNA, 13 nt, synthetic construct
  source 1..13: mol_type = other RNA
tcgccggccgcgg

SEQ ID NO: 1025 - RNA, 12 nt, synthetic construct
  source 1..12: mol_type = other RNA
tcgccggccgcg

SEQ ID NO: 1026 - RNA, 11 nt, synthetic construct
  source 1..11: mol_type = other RNA
tcgccggccgc

SEQ ID NO: 1027 - RNA, 10 nt, synthetic construct
  source 1..10: mol_type = other RNA
tcgccggccg

SEQ ID NO: 1028-1034 - skipped (7 entries)

SEQ ID NO: 1035 - RNA, 144 nt, synthetic construct
  source 1..144: mol_type = other RNA
gggtccgcggccggcgaacggttttagagctagaaatagcaagttaaaataaggctagtccgttatcaacttgaaaaagtggcaccgagtcggtgcggcttgtcgacgacggcggtctccgtcgtcaggatcattcgccggccg

SEQ ID NO: 1036 - RNA, 146 nt, synthetic construct
  source 1..146: mol_type = other RNA
gggtccgcggccggcgaacggttttagagctagaaatagcaagttaaaataaggctagtccgttatcaacttgaaaaagtggcaccgagtcggtgcggcttgtcgacgacggcggtctccgtcgtcaggatcattcgccggccgcg

SEQ ID NO: 1037 - RNA, 141 nt, synthetic construct
  source 1..141: mol_type = other RNA
gggtccgcggccggcgaacggttttagagctagaaatagcaagttaaaataaggctagtccgttatcaacttgaaaaagtggcaccgagtcggtgcgcgaaccgacgtcacggctcggggtactgaggacttcgccggccg

SEQ ID NO: 1038 - RNA, 136 nt, synthetic construct
  source 1..136: mol_type = other RNA
gggtccgcggccggcgaacggttttagagctagaaatagcaagttaaaataaggctagtccgttatcaacttgaaaaagtggcaccgagtcggtgcggtactacgtaagcagataaggtaaacacttcgccggccg

SEQ ID NO: 1039 - RNA, 146 nt, synthetic construct
  source 1..146: mol_type = other RNA
gggtccgcggccggcgaacggttttagagctagaaatagcaagttaaaataaggctagtccgttatcaacttgaaaaagtggcaccgagtcggtgcatactgccggccgagagtaaaggacaggtcattagggtattcgccggccg

SEQ ID NO: 1040 - RNA, 134 nt, synthetic construct
  source 1..134: mol_type = other RNA
gggtccgcggccggcgaacggttttagagctagaaatagcaagttaaaataaggctagtccgttatcaacttgaaaaagtggcaccgagtcggtgccgagcttacccgtggggaagcaagggattcgccggccg

SEQ ID NO: 1041 - RNA, 128 nt, synthetic construct
  source 1..128: mol_type = other RNA
gggtccgcggccggcgaacggttttagagctagaaatagcaagttaaaataaggctagtccgttatcaacttgaaaaagtggcaccgagtcggtgcggaccagtgtccgtggcgagattcgccggccg

SEQ ID NO: 1042 - RNA, 128 nt, synthetic construct
  source 1..128: mol_type = other RNA
gggtccgcggccggcgaacggttttagagctagaaatagcaagttaaaataaggctagtccgttatcaacttgaaaaagtggcaccgagtcggtgcgtttcacatggcctggactcattcgccggccg

SEQ ID NO: 1043 - RNA, 134 nt, synthetic construct
  source 1..134: mol_type = other RNA
gggtccgcggccggcgaacggttttagagctagaaatagcaagttaaaataaggctagtccgttatcaacttgaaaaagtggcaccgagtcggtgccagacggtggcgcactcatgccacgctttcgccggccg

SEQ ID NO: 1044 - RNA, 126 nt, synthetic construct
  source 1..126: mol_type = other RNA
gggtccgcggccggcgaacggttttagagctagaaatagcaagttaaaataaggctagtccgttatcaacttgaaaaagtggcaccgagtcggtgcctagcgtggcaggtctgcattcgccggccg

SEQ ID NO: 1045 - RNA, 131 nt, synthetic construct
  source 1..131: mol_type = other RNA
gggtccgcggccggcgaacggttttagagctagaaatagcaagttaaaataaggctagtccgttatcaacttgaaaaagtggcaccgagtcggtgctcttgtgaatggaattgaggagctttcgccggccg

SEQ ID NO: 1046 - RNA, 128 nt, synthetic construct
  source 1..128: mol_type = other RNA
gggtccgcggccggcgaacggttttagagctagaaatagcaagttaaaataaggctagtccgttatcaacttgaaaaagtggcaccgagtcggtgcgctacgggttcgcctgagcaattcgccggccg

SEQ ID NO: 1047 - RNA, 121 nt, synthetic construct
  source 1..121: mol_type = other RNA
gggtccgcggccggcgaacggttttagagctagaaatagcaagttaaaataaggctagtccgttatcaacttgaaaaagtggcaccgagtcggtgcaggatcatcgatttgtcgccggccg

SEQ ID NO: 1048 - RNA, 121 nt, synthetic construct
  source 1..121: mol_type = other RNA
gggtccgcggccggcgaacggttttagagctagaaatagcaagttaaaataaggctagtccgttatcaacttgaaaaagtggcaccgagtcggtgcacagctgggcaggtgtcgccggccg

SEQ ID NO: 1049 - RNA, 134 nt, synthetic construct
  source 1..134: mol_type = other RNA
gggtccgcggccggcgaacggttttagagctagaaatagcaagttaaaataaggctagtccgttatcaacttgaaaaagtggcaccgagtcggtgccatcggtggtcacttggcggagctcgtgtcgccggccg

SEQ ID NO: 1050 - RNA, 126 nt, synthetic construct
  source 1..126: mol_type = other RNA
gggtccgcggccggcgaacggttttagagctagaaatagcaagttaaaataaggctagtccgttatcaacttgaaaaagtggcaccgagtcggtgcagagcggcggcccggccgtgtcgccggccg

SEQ ID NO: 1051 - RNA, 136 nt, synthetic construct
  source 1..136: mol_type = other RNA
gggtccgcggccggcgaacggttttagagctagaaatagcaagttaaaataaggctagtccgttatcaacttgaaaaagtggcaccgagtcggtgcaatcggcgaacgaaacccgaagcgcacgtgtcgccggccg

SEQ ID NO: 1052 - RNA, 121 nt, synthetic construct
  source 1..121: mol_type = other RNA
gggtccgcggccggcgaacggttttagagctagaaatagcaagttaaaataaggctagtccgttatcaacttgaaaaagtggcaccgagtcggtgcgccctgtccgtagtgtcgccggccg

SEQ ID NO: 1053 - RNA, 124 nt, synthetic construct
  source 1..124: mol_type = other RNA
gggtccgcggccggcgaacggttttagagctagaaatagcaagttaaaataaggctagtccgttatcaacttgaaaaagtggcaccgagtcggtgccattgcatacctatagtgtcgccggccg

SEQ ID NO: 1054 - RNA, 131 nt, synthetic construct
  source 1..131: mol_type = other RNA
gggtccgcggccggcgaacggttttagagctagaaatagcaagttaaaataaggctagtccgttatcaacttgaaaaagtggcaccgagtcggtgcggccgcagaccgaagcggtgcagtgtcgccggccg

SEQ ID NO: 1055 - RNA, 124 nt, synthetic construct
  source 1..124: mol_type = other RNA
gggtccgcggccggcgaacggttttagagctagaaatagcaagttaaaataaggctagtccgttatcaacttgaaaaagtggcaccgagtcggtgcgcggccgtcccggggctgtcgccggccg

SEQ ID NO: 1056 - RNA, 116 nt, synthetic construct
  source 1..116: mol_type = other RNA
gggtccgcggccggcgaacggttttagagctagaaatagcaagttaaaataaggctagtccgttatcaacttgaaaaagtggcaccgagtcggtgcgcctaggctgtcgccggccg

SEQ ID NO: 1057 - RNA, 128 nt, synthetic construct
  source 1..128: mol_type = other RNA
gggtccgcggccggcgaacggttttagagctagaaatagcaagttaaaataaggctagtccgttatcaacttgaaaaagtggcaccgagtcggtgcccccaaccgccggcggccgatgtcgccggccg

SEQ ID NO: 1058 - RNA, 128 nt, synthetic construct
  source 1..128: mol_type = other RNA
gggtccgcggccggcgaacggttttagagctagaaatagcaagttaaaataaggctagtccgttatcaacttgaaaaagtggcaccgagtcggtgcagcctgccccgggccgcggtggtcgccggccg

SEQ ID NO: 1059 - RNA, 116 nt, synthetic construct
  source 1..116: mol_type = other RNA
gggtccgcggccggcgaacggttttagagctagaaatagcaagttaaaataaggctagtccgttatcaacttgaaaaagtggcaccgagtcggtgcctgacactggtcgccggccg

SEQ ID NO: 1060 - RNA, 136 nt, synthetic construct
  source 1..136: mol_type = other RNA
gggtccgcggccggcgaacggttttagagctagaaatagcaagttaaaataaggctagtccgttatcaacttgaaaaagtggcaccgagtcggtgcaagacaccgcctgggccccgattgatatggtcgccggccg

SEQ ID NO: 1061 - RNA, 126 nt, synthetic construct
  source 1..126: mol_type = other RNA
gggtccgcggccggcgaacggttttagagctagaaatagcaagttaaaataaggctagtccgttatcaacttgaaaaagtggcaccgagtcggtgcggccggacggggcggcggggtcgccggccg

SEQ ID NO: 1062 - RNA, 141 nt, synthetic construct
  source 1..141: mol_type = other RNA
gggtccgcggccggcgaacggttttagagctagaaatagcaagttaaaataaggctagtccgttatcaacttgaaaaagtggcaccgagtcggtgccacccggcccgccgctcccgggcccggggccggggtcgccggccg

SEQ ID NO: 1063 - RNA, 116 nt, synthetic construct
  source 1..116: mol_type = other RNA
gggtccgcggccggcgaacggttttagagctagaaatagcaagttaaaataaggctagtccgttatcaacttgaaaaagtggcaccgagtcggtgccaccggcgggtcgccggccg

SEQ ID NO: 1064 - RNA, 126 nt, synthetic construct
  source 1..126: mol_type = other RNA
gggtccgcggccggcgaacggttttagagctagaaatagcaagttaaaataaggctagtccgttatcaacttgaaaaagtggcaccgagtcggtgctggtacggccggattccgggtcgccggccg

SEQ ID NO: 1065 - RNA, 121 nt, synthetic construct
  source 1..121: mol_type = other RNA
gggtccgcggccggcgaacggttttagagctagaaatagcaagttaaaataaggctagtccgttatcaacttgaaaaagtggcaccgagtcggtgcccgggtggcgccgggtcgccggccg

SEQ ID NO: 1066 - RNA, 131 nt, synthetic construct
  source 1..131: mol_type = other RNA
gggtccgcggccggcgaacggttttagagctagaaatagcaagttaaaataaggctagtccgttatcaacttgaaaaagtggcaccgagtcggtgctcggcggccgggctcaggcgccgggtcgccggccg

SEQ ID NO: 1067 - RNA, 131 nt, synthetic construct
  source 1..131: mol_type = other RNA
gggtccgcggccggcgaacggttttagagctagaaatagcaagttaaaataaggctagtccgttatcaacttgaaaaagtggcaccgagtcggtgcggcgaggcagccccaaggccccgggtcgccggccg

SEQ ID NO: 1068 - RNA, 128 nt, synthetic construct
  source 1..128: mol_type = other RNA
gggtccgcggccggcgaacggttttagagctagaaatagcaagttaaaataaggctagtccgttatcaacttgaaaaagtggcaccgagtcggtgcgttcgcgggtgggcgttacgggtcgccggccg

SEQ ID NO: 1069 - RNA, 126 nt, synthetic construct
  source 1..126: mol_type = other RNA
gggtccgcggccggcgaacggttttagagctagaaatagcaagttaaaataaggctagtccgttatcaacttgaaaaagtggcaccgagtcggtgcctaccctcctccgcgacgggtcgccggccg

SEQ ID NO: 1070 - RNA, 134 nt, synthetic construct
  source 1..134: mol_type = other RNA
gggtccgcggccggcgaacggttttagagctagaaatagcaagttaaaataaggctagtccgttatcaacttgaaaaagtggcaccgagtcggtgcgtgaagtcggcgtgaccgagggcacgggtcgccggccg

SEQ ID NO: 1071 - RNA, 116 nt, synthetic construct
  source 1..116: mol_type = other RNA
gggtccgcggccggcgaacggttttagagctagaaatagcaagttaaaataaggctagtccgttatcaacttgaaaaagtggcaccgagtcggtgcccggcaagggtcgccggccg

SEQ ID NO: 1072 - RNA, 131 nt, synthetic construct
  source 1..131: mol_type = other RNA
gggtccgcggccggcgaacggttttagagctagaaatagcaagttaaaataaggctagtccgttatcaacttgaaaaagtggcaccgagtcggtgctggtagtttccggtttcggcctcggtcgccggccg

SEQ ID NO: 1073 - RNA, 126 nt, synthetic construct
  source 1..126: mol_type = other RNA
gggtccgcggccggcgaacggttttagagctagaaatagcaagttaaaataaggctagtccgttatcaacttgaaaaagtggcaccgagtcggtgctcggacaccctagacctcggtcgccggccg

SEQ ID NO: 1074 - RNA, 128 nt, synthetic construct
  source 1..128: mol_type = other RNA
gggtccgcggccggcgaacggttttagagctagaaatagcaagttaaaataaggctagtccgttatcaacttgaaaaagtggcaccgagtcggtgcggcgcgggcgggccgggatcggtcgccggccg

SEQ ID NO: 1075 - RNA, 126 nt, synthetic construct
  source 1..126: mol_type = other RNA
gggtccgcggccggcgaacggttttagagctagaaatagcaagttaaaataaggctagtccgttatcaacttgaaaaagtggcaccgagtcggtgcgccccacgggccgagtgcggtcgccggccg

SEQ ID NO: 1076 - RNA, 134 nt, synthetic construct
  source 1..134: mol_type = other RNA
gggtccgcggccggcgaacggttttagagctagaaatagcaagttaaaataaggctagtccgttatcaacttgaaaaagtggcaccgagtcggtgcagctgcagcccgcctccacgacgggcggtcgccggccg

SEQ ID NO: 1077 - RNA, 141 nt, synthetic construct
  source 1..141: mol_type = other RNA
gggtccgcggccggcgaacggttttagagctagaaatagcaagttaaaataaggctagtccgttatcaacttgaaaaagtggcaccgagtcggtgccccgcgccgccagccctagggtggccgctcggcggtcgccggccg

SEQ ID NO: 1078 - RNA, 146 nt, synthetic construct
  source 1..146: mol_type = other RNA
gggtccgcggccggcgaacggttttagagctagaaatagcaagttaaaataaggctagtccgttatcaacttgaaaaagtggcaccgagtcggtgcgcggggcccggcgagtttggcagcgcgacgagcctcgcggtcgccggccg

SEQ ID NO: 1079 - RNA, 128 nt, synthetic construct
  source 1..128: mol_type = other RNA
gggtccgcggccggcgaacggttttagagctagaaatagcaagttaaaataaggctagtccgttatcaacttgaaaaagtggcaccgagtcggtgcgccgcccgcctccgcggcgcggtcgccggccg

SEQ ID NO: 1080 - RNA, 124 nt, synthetic construct
  source 1..124: mol_type = other RNA
gggtccgcggccggcgaacggttttagagctagaaatagcaagttaaaataaggctagtccgttatcaacttgaaaaagtggcaccgagtcggtgcgccgtaacctccgcgcggtcgccggccg

SEQ ID NO: 1081 - RNA, 146 nt, synthetic construct
  source 1..146: mol_type = other RNA
gggtccgcggccggcgaacggttttagagctagaaatagcaagttaaaataaggctagtccgttatcaacttgaaaaagtggcaccgagtcggtgcgcgccggcgcgccaggcgcggcccggccgtgcccgcgcggtcgccggccg

SEQ ID NO: 1082 - RNA, 141 nt, synthetic construct
  source 1..141: mol_type = other RNA
gggtccgcggccggcgaacggttttagagctagaaatagcaagttaaaataaggctagtccgttatcaacttgaaaaagtggcaccgagtcggtgccgctggggcctcccgtcggggcctggcacgcgcggtcgccggccg

SEQ ID NO: 1083 - RNA, 116 nt, synthetic construct
  source 1..116: mol_type = other RNA
gggtccgcggccggcgaacggttttagagctagaaatagcaagttaaaataaggctagtccgttatcaacttgaaaaagtggcaccgagtcggtgcgccagcgcggtcgccggccg

SEQ ID NO: 1084 - RNA, 121 nt, synthetic construct
  source 1..121: mol_type = other RNA
gggtccgcggccggcgaacggttttagagctagaaatagcaagttaaaataaggctagtccgttatcaacttgaaaaagtggcaccgagtcggtgcattgttcgcaagcggtcgccggccg

SEQ ID NO: 1085 - RNA, 128 nt, synthetic construct
  source 1..128: mol_type = other RNA
gggtccgcggccggcgaacggttttagagctagaaatagcaagttaaaataaggctagtccgttatcaacttgaaaaagtggcaccgagtcggtgcggggcccggcctcaggggccggtcgccggccg

SEQ ID NO: 1086 - RNA, 126 nt, synthetic construct
  source 1..126: mol_type = other RNA
gggtccgcggccggcgaacggttttagagctagaaatagcaagttaaaataaggctagtccgttatcaacttgaaaaagtggcaccgagtcggtgccctttagaaggccaggccggtcgccggccg

SEQ ID NO: 1087 - RNA, 136 nt, synthetic construct
  source 1..136: mol_type = other RNA
gggtccgcggccggcgaacggttttagagctagaaatagcaagttaaaataaggctagtccgttatcaacttgaaaaagtggcaccgagtcggtgcgccccgcagcggcacggcctgtggcgccggtcgccggccg

SEQ ID NO: 1088 - RNA, 116 nt, synthetic construct
  source 1..116: mol_type = other RNA
gggtccgcggccggcgaacggttttagagctagaaatagcaagttaaaataaggctagtccgttatcaacttgaaaaagtggcaccgagtcggtgctgtccgccggtcgccggccg

SEQ ID NO: 1089 - RNA, 131 nt, synthetic construct
  source 1..131: mol_type = other RNA
gggtccgcggccggcgaacggttttagagctagaaatagcaagttaaaataaggctagtccgttatcaacttgaaaaagtggcaccgagtcggtgcctagcttcgatcgctacggagccggtcgccggccg

SEQ ID NO: 1090 - RNA, 136 nt, synthetic construct
  source 1..136: mol_type = other RNA
gggtccgcggccggcgaacggttttagagctagaaatagcaagttaaaataaggctagtccgttatcaacttgaaaaagtggcaccgagtcggtgctcgacggtatcggcccagcctgcgagccggtcgccggccg

SEQ ID NO: 1091 - RNA, 134 nt, synthetic construct
  source 1..134: mol_type = other RNA
gggtccgcggccggcgaacggttttagagctagaaatagcaagttaaaataaggctagtccgttatcaacttgaaaaagtggcaccgagtcggtgcacggcgcgcaacaacggccacctcccggtcgccggccg

SEQ ID NO: 1092 - RNA, 141 nt, synthetic construct
  source 1..141: mol_type = other RNA
gggtccgcggccggcgaacggttttagagctagaaatagcaagttaaaataaggctagtccgttatcaacttgaaaaagtggcaccgagtcggtgcgtacgagccgggccgccggggaagccgttccccggtcgccggccg

SEQ ID NO: 1093 - RNA, 126 nt, synthetic construct
  source 1..126: mol_type = other RNA
gggtccgcggccggcgaacggttttagagctagaaatagcaagttaaaataaggctagtccgttatcaacttgaaaaagtggcaccgagtcggtgctttacactagatggtgctgttcgccggccg

SEQ ID NO: 1094 - RNA, 121 nt, synthetic construct
  source 1..121: mol_type = other RNA
gggtccgcggccggcgaacggttttagagctagaaatagcaagttaaaataaggctagtccgttatcaacttgaaaaagtggcaccgagtcggtgccggacgtgctaccggtcgccggccg

SEQ ID NO: 1095 - RNA, 131 nt, synthetic construct
  source 1..131: mol_type = other RNA
gggtccgcggccggcgaacggttttagagctagaaatagcaagttaaaataaggctagtccgttatcaacttgaaaaagtggcaccgagtcggtgcatggcagtaggtgtcaatactacggtcgccggccg

SEQ ID NO: 1096 - RNA, 116 nt, synthetic construct
  source 1..116: mol_type = other RNA
gggtccgcggccggcgaacggttttagagctagaaatagcaagttaaaataaggctagtccgttatcaacttgaaaaagtggcaccgagtcggtgccggaggacggtcgccggccg

SEQ ID NO: 1097 - RNA, 126 nt, synthetic construct
  source 1..126: mol_type = other RNA
gggtccgcggccggcgaacggttttagagctagaaatagcaagttaaaataaggctagtccgttatcaacttgaaaaagtggcaccgagtcggtgctgcgggcggccgtgtataggtcgccggccg

SEQ ID NO: 1098 - RNA, 121 nt, synthetic construct
  source 1..121: mol_type = other RNA
gggtccgcggccggcgaacggttttagagctagaaatagcaagttaaaataaggctagtccgttatcaacttgaaaaagtggcaccgagtcggtgctgcgggtcaccgaggtcgccggccg

SEQ ID NO: 1099 - RNA, 121 nt, synthetic construct
  source 1..121: mol_type = other RNA
gggtccgcggccggcgaacggttttagagctagaaatagcaagttaaaataaggctagtccgttatcaacttgaaaaagtggcaccgagtcggtgcgccacgaggctcaggtcgccggccg

SEQ ID NO: 1100 - RNA, 131 nt, synthetic construct
  source 1..131: mol_type = other RNA
gggtccgcggccggcgaacggttttagagctagaaatagcaagttaaaataaggctagtccgttatcaacttgaaaaagtggcaccgagtcggtgcttaaaggggacaataacgcttaaggtcgccggccg

SEQ ID NO: 1101 - RNA, 126 nt, synthetic construct
  source 1..126: mol_type = other RNA
gggtccgcggccggcgaacggttttagagctagaaatagcaagttaaaataaggctagtccgttatcaacttgaaaaagtggcaccgagtcggtgcgaaacttaaagatgataaggtcgccggccg

SEQ ID NO: 1102 - RNA, 128 nt, synthetic construct
  source 1..128: mol_type = other RNA
gggtccgcggccggcgaacggttttagagctagaaatagcaagttaaaataaggctagtccgttatcaacttgaaaaagtggcaccgagtcggtgccgctccgcgtcccaataggtcgtcgccggccg

SEQ ID NO: 1103 - RNA, 131 nt, synthetic construct
  source 1..131: mol_type = other RNA
gggtccgcggccggcgaacggttttagagctagaaatagcaagttaaaataaggctagtccgttatcaacttgaaaaagtggcaccgagtcggtgcccttgtgggctgcgccgagcagtcgtcgccggccg

SEQ ID NO: 1104 - RNA, 121 nt, synthetic construct
  source 1..121: mol_type = other RNA
gggtccgcggccggcgaacggttttagagctagaaatagcaagttaaaataaggctagtccgttatcaacttgaaaaagtggcaccgagtcggtgcgccgccctggcctcgtcgccggccg

SEQ ID NO: 1105 - RNA, 141 nt, synthetic construct
  source 1..141: mol_type = other RNA
gggtccgcggccggcgaacggttttagagctagaaatagcaagttaaaataaggctagtccgttatcaacttgaaaaagtggcaccgagtcggtgcgggccaagccgcaggtaccggagaacccggtggcgtcgccggccg

SEQ ID NO: 1106 - RNA, 134 nt, synthetic construct
  source 1..134: mol_type = other RNA
gggtccgcggccggcgaacggttttagagctagaaatagcaagttaaaataaggctagtccgttatcaacttgaaaaagtggcaccgagtcggtgcagcatatttcacctattggacctgggcgtcgccggccg

SEQ ID NO: 1107 - RNA, 146 nt, synthetic construct
  source 1..146: mol_type = other RNA
gggtccgcggccggcgaacggttttagagctagaaatagcaagttaaaataaggctagtccgttatcaacttgaaaaagtggcaccgagtcggtgcgcgcgcgggcattgggcgcgggccggcgcgggctggggcgtcgccggccg

SEQ ID NO: 1108 - RNA, 134 nt, synthetic construct
  source 1..134: mol_type = other RNA
gggtccgcggccggcgaacggttttagagctagaaatagcaagttaaaataaggctagtccgttatcaacttgaaaaagtggcaccgagtcggtgcgcccgctcagcctccccggcccggggcgtcgccggccg

SEQ ID NO: 1109 - RNA, 134 nt, synthetic construct
  source 1..134: mol_type = other RNA
gggtccgcggccggcgaacggttttagagctagaaatagcaagttaaaataaggctagtccgttatcaacttgaaaaagtggcaccgagtcggtgcccggggacgccacgcgcggtgcgcggcgtcgccggccg

SEQ ID NO: 1110 - RNA, 124 nt, synthetic construct
  source 1..124: mol_type = other RNA
gggtccgcggccggcgaacggttttagagctagaaatagcaagttaaaataaggctagtccgttatcaacttgaaaaagtggcaccgagtcggtgctacccggccgctccggcgtcgccggccg

SEQ ID NO: 1111 - RNA, 126 nt, synthetic construct
  source 1..126: mol_type = other RNA
gggtccgcggccggcgaacggttttagagctagaaatagcaagttaaaataaggctagtccgttatcaacttgaaaaagtggcaccgagtcggtgcgctgggcgacggccggcgcgtcgccggccg

SEQ ID NO: 1112 - RNA, 131 nt, synthetic construct
  source 1..131: mol_type = other RNA
gggtccgcggccggcgaacggttttagagctagaaatagcaagttaaaataaggctagtccgttatcaacttgaaaaagtggcaccgagtcggtgccctaccaccctccgcagcgcgcgcgtcgccggccg

SEQ ID NO: 1113 - RNA, 141 nt, synthetic construct
  source 1..141: mol_type = other RNA
gggtccgcggccggcgaacggttttagagctagaaatagcaagttaaaataaggctagtccgttatcaacttgaaaaagtggcaccgagtcggtgcaagtagggcaggggacatccggtcccgctagcgcgtcgccggccg

SEQ ID NO: 1114 - RNA, 141 nt, synthetic construct
  source 1..141: mol_type = other RNA
gggtccgcggccggcgaacggttttagagctagaaatagcaagttaaaataaggctagtccgttatcaacttgaaaaagtggcaccgagtcggtgccgccgccagcgcgcgacgcggtgccggccgccgcgtcgccggccg

SEQ ID NO: 1115 - RNA, 134 nt, synthetic construct
  source 1..134: mol_type = other RNA
gggtccgcggccggcgaacggttttagagctagaaatagcaagttaaaataaggctagtccgttatcaacttgaaaaagtggcaccgagtcggtgcggggcggcgccggcggccggctcccgcgtcgccggccg

SEQ ID NO: 1116 - RNA, 131 nt, synthetic construct
  source 1..131: mol_type = other RNA
gggtccgcggccggcgaacggttttagagctagaaatagcaagttaaaataaggctagtccgttatcaacttgaaaaagtggcaccgagtcggtgcgcgtcgcccgccggcagcggacgcgtcgccggccg

SEQ ID NO: 1117 - RNA, 116 nt, synthetic construct
  source 1..116: mol_type = other RNA
gggtccgcggccggcgaacggttttagagctagaaatagcaagttaaaataaggctagtccgttatcaacttgaaaaagtggcaccgagtcggtgccgagcgagcgtcgccggccg

SEQ ID NO: 1118 - RNA, 146 nt, synthetic construct
  source 1..146: mol_type = other RNA
gggtccgcggccggcgaacggttttagagctagaaatagcaagttaaaataaggctagtccgttatcaacttgaaaaagtggcaccgagtcggtgccgtcgcccggacggggcccggcccacgcgcgagtctgccgtcgccggccg

SEQ ID NO: 1119 - RNA, 124 nt, synthetic construct
  source 1..124: mol_type = other RNA
gggtccgcggccggcgaacggttttagagctagaaatagcaagttaaaataaggctagtccgttatcaacttgaaaaagtggcaccgagtcggtgctctgccctcctcttgggttcgccggccg

SEQ ID NO: 1120 - RNA, 124 nt, synthetic construct
  source 1..124: mol_type = other RNA
gggtccgcggccggcgaacggttttagagctagaaatagcaagttaaaataaggctagtccgttatcaacttgaaaaagtggcaccgagtcggtgcatcgcgcgctggtggccgtcgccggccg

SEQ ID NO: 1121 - RNA, 124 nt, synthetic construct
  source 1..124: mol_type = other RNA
gggtccgcggccggcgaacggttttagagctagaaatagcaagttaaaataaggctagtccgttatcaacttgaaaaagtggcaccgagtcggtgcccctcgtacagcgcgccgtcgccggccg

SEQ ID NO: 1122 - RNA, 134 nt, synthetic construct
  source 1..134: mol_type = other RNA
gggtccgcggccggcgaacggttttagagctagaaatagcaagttaaaataaggctagtccgttatcaacttgaaaaagtggcaccgagtcggtgcgcacggggcacgtcccgggacgtagccgtcgccggccg

SEQ ID NO: 1123 - RNA, 121 nt, synthetic construct
  source 1..121: mol_type = other RNA
gggtccgcggccggcgaacggttttagagctagaaatagcaagttaaaataaggctagtccgttatcaacttgaaaaagtggcaccgagtcggtgccccggcgaccagccgtcgccggccg

SEQ ID NO: 1124 - RNA, 136 nt, synthetic construct
  source 1..136: mol_type = other RNA
gggtccgcggccggcgaacggttttagagctagaaatagcaagttaaaataaggctagtccgttatcaacttgaaaaagtggcaccgagtcggtgcaaagggttgcactttgctgatacgtggggttcgccggccg

SEQ ID NO: 1125 - RNA, 136 nt, synthetic construct
  source 1..136: mol_type = other RNA
gggtccgcggccggcgaacggttttagagctagaaatagcaagttaaaataaggctagtccgttatcaacttgaaaaagtggcaccgagtcggtgcgtgcgccgggccccgcgccccagcctcccgtcgccggccg

SEQ ID NO: 1126 - RNA, 121 nt, synthetic construct
  source 1..121: mol_type = other RNA
gggtccgcggccggcgaacggttttagagctagaaatagcaagttaaaataaggctagtccgttatcaacttgaaaaagtggcaccgagtcggtgccgcacgcggggcccgtcgccggccg

SEQ ID NO: 1127 - RNA, 131 nt, synthetic construct
  source 1..131: mol_type = other RNA
gggtccgcggccggcgaacggttttagagctagaaatagcaagttaaaataaggctagtccgttatcaacttgaaaaagtggcaccgagtcggtgcttgcggtggtgtcgggtgcggcccgtcgccggccg

SEQ ID NO: 1128 - RNA, 124 nt, synthetic construct
  source 1..124: mol_type = other RNA
gggtccgcggccggcgaacggttttagagctagaaatagcaagttaaaataaggctagtccgttatcaacttgaaaaagtggcaccgagtcggtgccatcagcggagctccccgtcgccggccg

SEQ ID NO: 1129 - RNA, 131 nt, synthetic construct
  source 1..131: mol_type = other RNA
gggtccgcggccggcgaacggttttagagctagaaatagcaagttaaaataaggctagtccgttatcaacttgaaaaagtggcaccgagtcggtgcgagggcggttagagtgccattaccgtcgccggccg

SEQ ID NO: 1130 - RNA, 128 nt, synthetic construct
  source 1..128: mol_type = other RNA
gggtccgcggccggcgaacggttttagagctagaaatagcaagttaaaataaggctagtccgttatcaacttgaaaaagtggcaccgagtcggtgcgaaagtcgctgcgcgcggaccgtcgccggccg

SEQ ID NO: 1131 - RNA, 121 nt, synthetic construct
  source 1..121: mol_type = other RNA
gggtccgcggccggcgaacggttttagagctagaaatagcaagttaaaataaggctagtccgttatcaacttgaaaaagtggcaccgagtcggtgcccccgggccggaccgtcgccggccg

SEQ ID NO: 1132 - RNA, 124 nt, synthetic construct
  source 1..124: mol_type = other RNA
gggtccgcggccggcgaacggttttagagctagaaatagcaagttaaaataaggctagtccgttatcaacttgaaaaagtggcaccgagtcggtgccgatcttcccgaacaccgtcgccggccg

SEQ ID NO: 1133 - RNA, 131 nt, synthetic construct
  source 1..131: mol_type = other RNA
gggtccgcggccggcgaacggttttagagctagaaatagcaagttaaaataaggctagtccgttatcaacttgaaaaagtggcaccgagtcggtgctgcacgggtacactgaagccctacgtcgccggccg

SEQ ID NO: 1134 - RNA, 134 nt, synthetic construct
  source 1..134: mol_type = other RNA
gggtccgcggccggcgaacggttttagagctagaaatagcaagttaaaataaggctagtccgttatcaacttgaaaaagtggcaccgagtcggtgcatatctcgttggtatttaatatgatacgtcgccggccg

SEQ ID NO: 1135 - RNA, 126 nt, synthetic construct
  source 1..126: mol_type = other RNA
gggtccgcggccggcgaacggttttagagctagaaatagcaagttaaaataaggctagtccgttatcaacttgaaaaagtggcaccgagtcggtgcgggcgtcggacccatcgacgtcgccggccg

SEQ ID NO: 1136 - RNA, 121 nt, synthetic construct
  source 1..121: mol_type = other RNA
gggtccgcggccggcgaacggttttagagctagaaatagcaagttaaaataaggctagtccgttatcaacttgaaaaagtggcaccgagtcggtgcgacacgcgcggcacgtcgccggccg

SEQ ID NO: 1137 - RNA, 128 nt, synthetic construct
  source 1..128: mol_type = other RNA
gggtccgcggccggcgaacggttttagagctagaaatagcaagttaaaataaggctagtccgttatcaacttgaaaaagtggcaccgagtcggtgctcctaacagcggacgacccacgtcgccggccg

SEQ ID NO: 1138 - RNA, 141 nt, synthetic construct
  source 1..141: mol_type = other RNA
gggtccgcggccggcgaacggttttagagctagaaatagcaagttaaaataaggctagtccgttatcaacttgaaaaagtggcaccgagtcggtgctcccctcccggcacgccgcgcggctcgccagaacgtcgccggccg

SEQ ID NO: 1139 - RNA, 134 nt, synthetic construct
  source 1..134: mol_type = other RNA
gggtccgcggccggcgaacggttttagagctagaaatagcaagttaaaataaggctagtccgttatcaacttgaaaaagtggcaccgagtcggtgcttacctattaccaagggctacatcttagtcgccggccg

SEQ ID NO: 1140 - RNA, 134 nt, synthetic construct
  source 1..134: mol_type = other RNA
gggtccgcggccggcgaacggttttagagctagaaatagcaagttaaaataaggctagtccgttatcaacttgaaaaagtggcaccgagtcggtgctagcactctatcgcataagtcattctagtcgccggccg

SEQ ID NO: 1141 - RNA, 116 nt, synthetic construct
  source 1..116: mol_type = other RNA
gggtccgcggccggcgaacggttttagagctagaaatagcaagttaaaataaggctagtccgttatcaacttgaaaaagtggcaccgagtcggtgcgcagtgctagtcgccggccg

SEQ ID NO: 1142 - RNA, 136 nt, synthetic construct
  source 1..136: mol_type = other RNA
gggtccgcggccggcgaacggttttagagctagaaatagcaagttaaaataaggctagtccgttatcaacttgaaaaagtggcaccgagtcggtgcgcgcgaacctgggatcgccatgcatgatagtcgccggccg

SEQ ID NO: 1143 - RNA, 128 nt, synthetic construct
  source 1..128: mol_type = other RNA
gggtccgcggccggcgaacggttttagagctagaaatagcaagttaaaataaggctagtccgttatcaacttgaaaaagtggcaccgagtcggtgcgccgactcagtgctgctctgagtcgccggccg

SEQ ID NO: 1144 - RNA, 134 nt, synthetic construct
  source 1..134: mol_type = other RNA
gggtccgcggccggcgaacggttttagagctagaaatagcaagttaaaataaggctagtccgttatcaacttgaaaaagtggcaccgagtcggtgcggagagatcacgctcgatacgaggggagtcgccggccg

SEQ ID NO: 1145 - RNA, 136 nt, synthetic construct
  source 1..136: mol_type = other RNA
gggtccgcggccggcgaacggttttagagctagaaatagcaagttaaaataaggctagtccgttatcaacttgaaaaagtggcaccgagtcggtgcatggcggactcagcgcgccgaagaacggagtcgccggccg

SEQ ID NO: 1146 - RNA, 126 nt, synthetic construct
  source 1..126: mol_type = other RNA
gggtccgcggccggcgaacggttttagagctagaaatagcaagttaaaataaggctagtccgttatcaacttgaaaaagtggcaccgagtcggtgcacttcacatccagtgacgagtcgccggccg

SEQ ID NO: 1147 - RNA, 126 nt, synthetic construct
  source 1..126: mol_type = other RNA
gggtccgcggccggcgaacggttttagagctagaaatagcaagttaaaataaggctagtccgttatcaacttgaaaaagtggcaccgagtcggtgcaagcgagtcagaagagagagtcgccggccg

SEQ ID NO: 1148 - RNA, 136 nt, synthetic construct
  source 1..136: mol_type = other RNA
gggtccgcggccggcgaacggttttagagctagaaatagcaagttaaaataaggctagtccgttatcaacttgaaaaagtggcaccgagtcggtgccagcgccccgccggcgtaccgccctagcagtcgccggccg

SEQ ID NO: 1149 - RNA, 136 nt, synthetic construct
  source 1..136: mol_type = other RNA
gggtccgcggccggcgaacggttttagagctagaaatagcaagttaaaataaggctagtccgttatcaacttgaaaaagtggcaccgagtcggtgcgccttactcgaccgccacgacctcgtccagtcgccggccg

SEQ ID NO: 1150 - RNA, 136 nt, synthetic construct
  source 1..136: mol_type = other RNA
gggtccgcggccggcgaacggttttagagctagaaatagcaagttaaaataaggctagtccgttatcaacttgaaaaagtggcaccgagtcggtgccctcggatggggccgcggctacgggtacagtcgccggccg

SEQ ID NO: 1151 - RNA, 121 nt, synthetic construct
  source 1..121: mol_type = other RNA
gggtccgcggccggcgaacggttttagagctagaaatagcaagttaaaataaggctagtccgttatcaacttgaaaaagtggcaccgagtcggtgcaattctgatgtaaagtcgccggccg

SEQ ID NO: 1152 - RNA, 131 nt, synthetic construct
  source 1..131: mol_type = other RNA
gggtccgcggccggcgaacggttttagagctagaaatagcaagttaaaataaggctagtccgttatcaacttgaaaaagtggcaccgagtcggtgctgataggtaaggtgtaattactttctcgccggccg

SEQ ID NO: 1153 - RNA, 116 nt, synthetic construct
  source 1..116: mol_type = other RNA
gggtccgcggccggcgaacggttttagagctagaaatagcaagttaaaataaggctagtccgttatcaacttgaaaaagtggcaccgagtcggtgcgtacggcttctcgccggccg

SEQ ID NO: 1154 - RNA, 124 nt, synthetic construct
  source 1..124: mol_type = other RNA
gggtccgcggccggcgaacggttttagagctagaaatagcaagttaaaataaggctagtccgttatcaacttgaaaaagtggcaccgagtcggtgctggggtacttatgtcgtctcgccggccg

SEQ ID NO: 1155 - RNA, 124 nt, synthetic construct
  source 1..124: mol_type = other RNA
gggtccgcggccggcgaacggttttagagctagaaatagcaagttaaaataaggctagtccgttatcaacttgaaaaagtggcaccgagtcggtgcctatccggtccgagcgtctcgccggccg

SEQ ID NO: 1156 - RNA, 136 nt, synthetic construct
  source 1..136: mol_type = other RNA
gggtccgcggccggcgaacggttttagagctagaaatagcaagttaaaataaggctagtccgttatcaacttgaaaaagtggcaccgagtcggtgcctgagcggcgaaggcatcccggcctccgtctcgccggccg

SEQ ID NO: 1157 - RNA, 134 nt, synthetic construct
  source 1..134: mol_type = other RNA
gggtccgcggccggcgaacggttttagagctagaaatagcaagttaaaataaggctagtccgttatcaacttgaaaaagtggcaccgagtcggtgcgctgtgggtcgcagtcacgcgggccgtctcgccggccg

SEQ ID NO: 1158 - RNA, 121 nt, synthetic construct
  source 1..121: mol_type = other RNA
gggtccgcggccggcgaacggttttagagctagaaatagcaagttaaaataaggctagtccgttatcaacttgaaaaagtggcaccgagtcggtgcgcacacaacgacgtctcgccggccg

SEQ ID NO: 1159 - RNA, 124 nt, synthetic construct
  source 1..124: mol_type = other RNA
gggtccgcggccggcgaacggttttagagctagaaatagcaagttaaaataaggctagtccgttatcaacttgaaaaagtggcaccgagtcggtgcactacgggtgggaacctctcgccggccg

SEQ ID NO: 1160 - RNA, 141 nt, synthetic construct
  source 1..141: mol_type = other RNA
gggtccgcggccggcgaacggttttagagctagaaatagcaagttaaaataaggctagtccgttatcaacttgaaaaagtggcaccgagtcggtgctcaaacatgaattcttcacgttgttaaagattatctcgccggccg

SEQ ID NO: 1161 - RNA, 141 nt, synthetic construct
  source 1..141: mol_type = other RNA
gggtccgcggccggcgaacggttttagagctagaaatagcaagttaaaataaggctagtccgttatcaacttgaaaaagtggcaccgagtcggtgcggtccattggcactaggggcgttcagtatcatatctcgccggccg

SEQ ID NO: 1162 - RNA, 136 nt, synthetic construct
  source 1..136: mol_type = other RNA
gggtccgcggccggcgaacggttttagagctagaaatagcaagttaaaataaggctagtccgttatcaacttgaaaaagtggcaccgagtcggtgctaactgctctatatacgagattatcaaatctcgccggccg

SEQ ID NO: 1163 - RNA, 134 nt, synthetic construct
  source 1..134: mol_type = other RNA
gggtccgcggccggcgaacggttttagagctagaaatagcaagttaaaataaggctagtccgttatcaacttgaaaaagtggcaccgagtcggtgccgatacggcgcccacggcggtgcattgctcgccggccg

SEQ ID NO: 1164 - RNA, 146 nt, synthetic construct
  source 1..146: mol_type = other RNA
gggtccgcggccggcgaacggttttagagctagaaatagcaagttaaaataaggctagtccgttatcaacttgaaaaagtggcaccgagtcggtgctccctgtccgccacctggcgctgctggcgtggacatgtgctcgccggccg

SEQ ID NO: 1165 - RNA, 136 nt, synthetic construct
  source 1..136: mol_type = other RNA
gggtccgcggccggcgaacggttttagagctagaaatagcaagttaaaataaggctagtccgttatcaacttgaaaaagtggcaccgagtcggtgcccggcgcagggcggaccgacgagagcgtgctcgccggccg

SEQ ID NO: 1166 - RNA, 124 nt, synthetic construct
  source 1..124: mol_type = other RNA
gggtccgcggccggcgaacggttttagagctagaaatagcaagttaaaataaggctagtccgttatcaacttgaaaaagtggcaccgagtcggtgcactctatcgattatctgctcgccggccg

SEQ ID NO: 1167 - RNA, 141 nt, synthetic construct
  source 1..141: mol_type = other RNA
gggtccgcggccggcgaacggttttagagctagaaatagcaagttaaaataaggctagtccgttatcaacttgaaaaagtggcaccgagtcggtgcactgccggggccggcgccgtcgcagcgtccgatgctcgccggccg

SEQ ID NO: 1168 - RNA, 131 nt, synthetic construct
  source 1..131: mol_type = other RNA
gggtccgcggccggcgaacggttttagagctagaaatagcaagttaaaataaggctagtccgttatcaacttgaaaaagtggcaccgagtcggtgcaaacagacattgtgcctgtgcatgctcgccggccg

SEQ ID NO: 1169 - RNA, 131 nt, synthetic construct
  source 1..131: mol_type = other RNA
gggtccgcggccggcgaacggttttagagctagaaatagcaagttaaaataaggctagtccgttatcaacttgaaaaagtggcaccgagtcggtgccgcgctccagcggtcggggcctggctcgccggccg

SEQ ID NO: 1170 - RNA, 131 nt, synthetic construct
  source 1..131: mol_type = other RNA
gggtccgcggccggcgaacggttttagagctagaaatagcaagttaaaataaggctagtccgttatcaacttgaaaaagtggcaccgagtcggtgccccctgcgcggaccgcgccttccgttcgccggccg

SEQ ID NO: 1171 - RNA, 128 nt, synthetic construct
  source 1..128: mol_type = other RNA
gggtccgcggccggcgaacggttttagagctagaaatagcaagttaaaataaggctagtccgttatcaacttgaaaaagtggcaccgagtcggtgctggaaatgccgtggcgtggggctcgccggccg

SEQ ID NO: 1172 - RNA, 124 nt, synthetic construct
  source 1..124: mol_type = other RNA
gggtccgcggccggcgaacggttttagagctagaaatagcaagttaaaataaggctagtccgttatcaacttgaaaaagtggcaccgagtcggtgcatgcgcgcgctgtcgggctcgccggccg

SEQ ID NO: 1173 - RNA, 124 nt, synthetic construct
  source 1..124: mol_type = other RNA
gggtccgcggccggcgaacggttttagagctagaaatagcaagttaaaataaggctagtccgttatcaacttgaaaaagtggcaccgagtcggtgccgggcggcgggagcgggctcgccggccg

SEQ ID NO: 1174 - RNA, 131 nt, synthetic construct
  source 1..131: mol_type = other RNA
gggtccgcggccggcgaacggttttagagctagaaatagcaagttaaaataaggctagtccgttatcaacttgaaaaagtggcaccgagtcggtgcggcaacgggacgtccccggggcggctcgccggccg

SEQ ID NO: 1175 - RNA, 126 nt, synthetic construct
  source 1..126: mol_type = other RNA
gggtccgcggccggcgaacggttttagagctagaaatagcaagttaaaataaggctagtccgttatcaacttgaaaaagtggcaccgagtcggtgcccagtcggccctgctccggctcgccggccg

SEQ ID NO: 1176 - RNA, 131 nt, synthetic construct
  source 1..131: mol_type = other RNA
gggtccgcggccggcgaacggttttagagctagaaatagcaagttaaaataaggctagtccgttatcaacttgaaaaagtggcaccgagtcggtgcacgcaggccttgcctccacgacggctcgccggccg

SEQ ID NO: 1177 - RNA, 141 nt, synthetic construct
  source 1..141: mol_type = other RNA
gggtccgcggccggcgaacggttttagagctagaaatagcaagttaaaataaggctagtccgttatcaacttgaaaaagtggcaccgagtcggtgccgtgcccgcagccggttggagtgtgagcgggaggctcgccggccg

SEQ ID NO: 1178 - RNA, 121 nt, synthetic construct
  source 1..121: mol_type = other RNA
gggtccgcggccggcgaacggttttagagctagaaatagcaagttaaaataaggctagtccgttatcaacttgaaaaagtggcaccgagtcggtgcgcggtgggcggaggctcgccggccg

SEQ ID NO: 1179 - RNA, 126 nt, synthetic construct
  source 1..126: mol_type = other RNA
gggtccgcggccggcgaacggttttagagctagaaatagcaagttaaaataaggctagtccgttatcaacttgaaaaagtggcaccgagtcggtgcagcggcttcgaatctcaggctcgccggccg

SEQ ID NO: 1180 - RNA, 146 nt, synthetic construct
  source 1..146: mol_type = other RNA
gggtccgcggccggcgaacggttttagagctagaaatagcaagttaaaataaggctagtccgttatcaacttgaaaaagtggcaccgagtcggtgccgaccggtgcgggccctcgtcgaggagcaagggtgcaggctcgccggccg

SEQ ID NO: 1181 - RNA, 128 nt, synthetic construct
  source 1..128: mol_type = other RNA
gggtccgcggccggcgaacggttttagagctagaaatagcaagttaaaataaggctagtccgttatcaacttgaaaaagtggcaccgagtcggtgcgcgccgttgcggccgcgcccgttcgccggccg

SEQ ID NO: 1182 - RNA, 136 nt, synthetic construct
  source 1..136: mol_type = other RNA
gggtccgcggccggcgaacggttttagagctagaaatagcaagttaaaataaggctagtccgttatcaacttgaaaaagtggcaccgagtcggtgctggaccgccacaggcttggccctagctcgctcgccggccg

SEQ ID NO: 1183 - RNA, 141 nt, synthetic construct
  source 1..141: mol_type = other RNA
gggtccgcggccggcgaacggttttagagctagaaatagcaagttaaaataaggctagtccgttatcaacttgaaaaagtggcaccgagtcggtgctgtgggacgttacattgagtattgagcgcgcacgttcgccggccg

SEQ ID NO: 1184 - RNA, 128 nt, synthetic construct
  source 1..128: mol_type = other RNA
gggtccgcggccggcgaacggttttagagctagaaatagcaagttaaaataaggctagtccgttatcaacttgaaaaagtggcaccgagtcggtgcgccccgggcgactggcactcgctcgccggccg

SEQ ID NO: 1185 - RNA, 136 nt, synthetic construct
  source 1..136: mol_type = other RNA
gggtccgcggccggcgaacggttttagagctagaaatagcaagttaaaataaggctagtccgttatcaacttgaaaaagtggcaccgagtcggtgccccgggtggtggccgcgccggtcagcgcgctcgccggccg

SEQ ID NO: 1186 - RNA, 136 nt, synthetic construct
  source 1..136: mol_type = other RNA
gggtccgcggccggcgaacggttttagagctagaaatagcaagttaaaataaggctagtccgttatcaacttgaaaaagtggcaccgagtcggtgccgaggtagaggcgaggagtagacgccgcgctcgccggccg

SEQ ID NO: 1187 - RNA, 126 nt, synthetic construct
  source 1..126: mol_type = other RNA
gggtccgcggccggcgaacggttttagagctagaaatagcaagttaaaataaggctagtccgttatcaacttgaaaaagtggcaccgagtcggtgcgatctaagaactgtctccgctcgccggccg

SEQ ID NO: 1188 - RNA, 121 nt, synthetic construct
  source 1..121: mol_type = other RNA
gggtccgcggccggcgaacggttttagagctagaaatagcaagttaaaataaggctagtccgttatcaacttgaaaaagtggcaccgagtcggtgctcgtgttcaatccgctcgccggccg

SEQ ID NO: 1189 - RNA, 121 nt, synthetic construct
  source 1..121: mol_type = other RNA
gggtccgcggccggcgaacggttttagagctagaaatagcaagttaaaataaggctagtccgttatcaacttgaaaaagtggcaccgagtcggtgcggacattcttgccgctcgccggccg

SEQ ID NO: 1190 - RNA, 146 nt, synthetic construct
  source 1..146: mol_type = other RNA
gggtccgcggccggcgaacggttttagagctagaaatagcaagttaaaataaggctagtccgttatcaacttgaaaaagtggcaccgagtcggtgcggtcctggtgacgacggggtgagagcgaacttaaggccgctcgccggccg

SEQ ID NO: 1191 - RNA, 124 nt, synthetic construct
  source 1..124: mol_type = other RNA
gggtccgcggccggcgaacggttttagagctagaaatagcaagttaaaataaggctagtccgttatcaacttgaaaaagtggcaccgagtcggtgcagcccgcgcgttacacgctcgccggccg

SEQ ID NO: 1192 - RNA, 124 nt, synthetic construct
  source 1..124: mol_type = other RNA
gggtccgcggccggcgaacggttttagagctagaaatagcaagttaaaataaggctagtccgttatcaacttgaaaaagtggcaccgagtcggtgcgaacactccggccgtagctcgccggccg

SEQ ID NO: 1193 - RNA, 136 nt, synthetic construct
  source 1..136: mol_type = other RNA
gggtccgcggccggcgaacggttttagagctagaaatagcaagttaaaataaggctagtccgttatcaacttgaaaaagtggcaccgagtcggtgcccggtcgtccgttcagagaccatgcggagctcgccggccg

SEQ ID NO: 1194 - RNA, 141 nt, synthetic construct
  source 1..141: mol_type = other RNA
gggtccgcggccggcgaacggttttagagctagaaatagcaagttaaaataaggctagtccgttatcaacttgaaaaagtggcaccgagtcggtgcgcgcccagaagtggggaagccgctgccaagagagctcgccggccg

SEQ ID NO: 1195 - RNA, 136 nt, synthetic construct
  source 1..136: mol_type = other RNA
gggtccgcggccggcgaacggttttagagctagaaatagcaagttaaaataaggctagtccgttatcaacttgaaaaagtggcaccgagtcggtgcctcgctctaagatttagccgctgaaagagctcgccggccg

SEQ ID NO: 1196 - RNA, 141 nt, synthetic construct
  source 1..141: mol_type = other RNA
gggtccgcggccggcgaacggttttagagctagaaatagcaagttaaaataaggctagtccgttatcaacttgaaaaagtggcaccgagtcggtgcatggggccttaacgacccgcgccccgcctctcagttcgccggccg

SEQ ID NO: 1197 - RNA, 121 nt, synthetic construct
  source 1..121: mol_type = other RNA
gggtccgcggccggcgaacggttttagagctagaaatagcaagttaaaataaggctagtccgttatcaacttgaaaaagtggcaccgagtcggtgcatgtacgggccgtcctcgccggccg

SEQ ID NO: 1198 - RNA, 126 nt, synthetic construct
  source 1..126: mol_type = other RNA
gggtccgcggccggcgaacggttttagagctagaaatagcaagttaaaataaggctagtccgttatcaacttgaaaaagtggcaccgagtcggtgcacgccatggagggatagtcctcgccggccg

SEQ ID NO: 1199 - RNA, 131 nt, synthetic construct
  source 1..131: mol_type = other RNA
gggtccgcggccggcgaacggttttagagctagaaatagcaagttaaaataaggctagtccgttatcaacttgaaaaagtggcaccgagtcggtgcgtcgctgatttcggtgcgagcctcctcgccggccg

SEQ ID NO: 1200 - RNA, 126 nt, synthetic construct
  source 1..126: mol_type = other RNA
gggtccgcggccggcgaacggttttagagctagaaatagcaagttaaaataaggctagtccgttatcaacttgaaaaagtggcaccgagtcggtgcctgcccctgagggacgatcctcgccggccg

SEQ ID NO: 1201 - RNA, 134 nt, synthetic construct
  source 1..134: mol_type = other RNA
gggtccgcggccggcgaacggttttagagctagaaatagcaagttaaaataaggctagtccgttatcaacttgaaaaagtggcaccgagtcggtgcgcaccgaagcgcggtccaatggacatcctcgccggccg

SEQ ID NO: 1202 - RNA, 136 nt, synthetic construct
  source 1..136: mol_type = other RNA
gggtccgcggccggcgaacggttttagagctagaaatagcaagttaaaataaggctagtccgttatcaacttgaaaaagtggcaccgagtcggtgctccaaggccaccccgcgggtaccggaatcctcgccggccg

SEQ ID NO: 1203 - RNA, 124 nt, synthetic construct
  source 1..124: mol_type = other RNA
gggtccgcggccggcgaacggttttagagctagaaatagcaagttaaaataaggctagtccgttatcaacttgaaaaagtggcaccgagtcggtgccgcgcacgccggggtgcctcgccggccg

SEQ ID NO: 1204 - RNA, 134 nt, synthetic construct
  source 1..134: mol_type = other RNA
gggtccgcggccggcgaacggttttagagctagaaatagcaagttaaaataaggctagtccgttatcaacttgaaaaagtggcaccgagtcggtgcccgcgtggggtggcggtgccccggtgcctcgccggccg

SEQ ID NO: 1205 - RNA, 131 nt, synthetic construct
  source 1..131: mol_type = other RNA
gggtccgcggccggcgaacggttttagagctagaaatagcaagttaaaataaggctagtccgttatcaacttgaaaaagtggcaccgagtcggtgcctcacgggtccccgagcccgctgcctcgccggccg

SEQ ID NO: 1206 - RNA, 141 nt, synthetic construct
  source 1..141: mol_type = other RNA
gggtccgcggccggcgaacggttttagagctagaaatagcaagttaaaataaggctagtccgttatcaacttgaaaaagtggcaccgagtcggtgccgcccggcccgttgaacgggtcactggcatcggcctcgccggccg

SEQ ID NO: 1207 - RNA, 134 nt, synthetic construct
  source 1..134: mol_type = other RNA
gggtccgcggccggcgaacggttttagagctagaaatagcaagttaaaataaggctagtccgttatcaacttgaaaaagtggcaccgagtcggtgcgcgcaccggagcggaggcagggccggcctcgccggccg

SEQ ID NO: 1208 - RNA, 131 nt, synthetic construct
  source 1..131: mol_type = other RNA
gggtccgcggccggcgaacggttttagagctagaaatagcaagttaaaataaggctagtccgttatcaacttgaaaaagtggcaccgagtcggtgccccgggcgccccgcgaggcccggcctcgccggccg

SEQ ID NO: 1209 - RNA, 136 nt, synthetic construct
  source 1..136: mol_type = other RNA
gggtccgcggccggcgaacggttttagagctagaaatagcaagttaaaataaggctagtccgttatcaacttgaaaaagtggcaccgagtcggtgcgccggccgcaccgggccgcgacgcccggcctcgccggccg

SEQ ID NO: 1210 - RNA, 136 nt, synthetic construct
  source 1..136: mol_type = other RNA
gggtccgcggccggcgaacggttttagagctagaaatagcaagttaaaataaggctagtccgttatcaacttgaaaaagtggcaccgagtcggtgcggcccaggcccgggctcccaggccggcgcctcgccggccg

SEQ ID NO: 1211 - RNA, 134 nt, synthetic construct
  source 1..134: mol_type = other RNA
gggtccgcggccggcgaacggttttagagctagaaatagcaagttaaaataaggctagtccgttatcaacttgaaaaagtggcaccgagtcggtgcccccgtcgtacgggccgctcccgccgcctcgccggccg

SEQ ID NO: 1212 - RNA, 124 nt, synthetic construct
  source 1..124: mol_type = other RNA
gggtccgcggccggcgaacggttttagagctagaaatagcaagttaaaataaggctagtccgttatcaacttgaaaaagtggcaccgagtcggtgccccgcgcgaggaggagcctcgccggccg

SEQ ID NO: 1213 - RNA, 144 nt, synthetic construct
  source 1..144: mol_type = other RNA
gggtccgcggccggcgaacggttttagagctagaaatagcaagttaaaataaggctagtccgttatcaacttgaaaaagtggcaccgagtcggtgcatgatcctgacgacggagaccgccgtcgtcgacaagcctcgccggccg

SEQ ID NO: 1214 - RNA, 128 nt, synthetic construct
  source 1..128: mol_type = other RNA
gggtccgcggccggcgaacggttttagagctagaaatagcaagttaaaataaggctagtccgttatcaacttgaaaaagtggcaccgagtcggtgcccaggtggtaccatatggtccctcgccggccg

SEQ ID NO: 1215 - RNA, 121 nt, synthetic construct
  source 1..121: mol_type = other RNA
gggtccgcggccggcgaacggttttagagctagaaatagcaagttaaaataaggctagtccgttatcaacttgaaaaagtggcaccgagtcggtgcacctttggccgttcttcgccggccg

SEQ ID NO: 1216 - RNA, 126 nt, synthetic construct
  source 1..126: mol_type = other RNA
gggtccgcggccggcgaacggttttagagctagaaatagcaagttaaaataaggctagtccgttatcaacttgaaaaagtggcaccgagtcggtgcctccgccctagtgtagtccctcgccggccg

SEQ ID NO: 1217 - RNA, 131 nt, synthetic construct
  source 1..131: mol_type = other RNA
gggtccgcggccggcgaacggttttagagctagaaatagcaagttaaaataaggctagtccgttatcaacttgaaaaagtggcaccgagtcggtgccgtggccgtaggtccggttcggccctcgccggccg

SEQ ID NO: 1218 - RNA, 131 nt, synthetic construct
  source 1..131: mol_type = other RNA
gggtccgcggccggcgaacggttttagagctagaaatagcaagttaaaataaggctagtccgttatcaacttgaaaaagtggcaccgagtcggtgcgtggtgacggaggctcccacggccctcgccggccg

SEQ ID NO: 1219 - RNA, 126 nt, synthetic construct
  source 1..126: mol_type = other RNA
gggtccgcggccggcgaacggttttagagctagaaatagcaagttaaaataaggctagtccgttatcaacttgaaaaagtggcaccgagtcggtgccgggccgccgatgtgcgccctcgccggccg

SEQ ID NO: 1220 - RNA, 124 nt, synthetic construct
  source 1..124: mol_type = other RNA
gggtccgcggccggcgaacggttttagagctagaaatagcaagttaaaataaggctagtccgttatcaacttgaaaaagtggcaccgagtcggtgcgctccccagtggccgccctcgccggccg

SEQ ID NO: 1221 - RNA, 128 nt, synthetic construct
  source 1..128: mol_type = other RNA
gggtccgcggccggcgaacggttttagagctagaaatagcaagttaaaataaggctagtccgttatcaacttgaaaaagtggcaccgagtcggtgccctaggcgggtcggagggcccctcgccggccg

SEQ ID NO: 1222 - RNA, 128 nt, synthetic construct
  source 1..128: mol_type = other RNA
gggtccgcggccggcgaacggttttagagctagaaatagcaagttaaaataaggctagtccgttatcaacttgaaaaagtggcaccgagtcggtgcaggatgggtagaataacgaccctcgccggccg

SEQ ID NO: 1223 - RNA, 141 nt, synthetic construct
  source 1..141: mol_type = other RNA
gggtccgcggccggcgaacggttttagagctagaaatagcaagttaaaataaggctagtccgttatcaacttgaaaaagtggcaccgagtcggtgccgcatgtcccgcctctacccaggaagatggcaccctcgccggccg

SEQ ID NO: 1224 - RNA, 116 nt, synthetic construct
  source 1..116: mol_type = other RNA
gggtccgcggccggcgaacggttttagagctagaaatagcaagttaaaataaggctagtccgttatcaacttgaaaaagtggcaccgagtcggtgcagcggggacctcgccggccg

SEQ ID NO: 1225 - RNA, 116 nt, synthetic construct
  source 1..116: mol_type = other RNA
gggtccgcggccggcgaacggttttagagctagaaatagcaagttaaaataaggctagtccgttatcaacttgaaaaagtggcaccgagtcggtgcctgcggcacctcgccggccg

SEQ ID NO: 1226 - RNA, 146 nt, synthetic construct
  source 1..146: mol_type = other RNA
gggtccgcggccggcgaacggttttagagctagaaatagcaagttaaaataaggctagtccgttatcaacttgaaaaagtggcaccgagtcggtgccctcctcacctttgccagagggacttcgcttgggaacacctcgccggccg

SEQ ID NO: 1227 - RNA, 136 nt, synthetic construct
  source 1..136: mol_type = other RNA
gggtccgcggccggcgaacggttttagagctagaaatagcaagttaaaataaggctagtccgttatcaacttgaaaaagtggcaccgagtcggtgccaagttgtgcccctagtgagcttggattactcgccggccg

SEQ ID NO: 1228 - RNA, 124 nt, synthetic construct
  source 1..124: mol_type = other RNA
gggtccgcggccggcgaacggttttagagctagaaatagcaagttaaaataaggctagtccgttatcaacttgaaaaagtggcaccgagtcggtgcttgctctctgccatgtactcgccggccg

SEQ ID NO: 1229 - RNA, 121 nt, synthetic construct
  source 1..121: mol_type = other RNA
gggtccgcggccggcgaacggttttagagctagaaatagcaagttaaaataaggctagtccgttatcaacttgaaaaagtggcaccgagtcggtgcggcaattaaccatactcgccggccg

SEQ ID NO: 1230 - RNA, 126 nt, synthetic construct
  source 1..126: mol_type = other RNA
gggtccgcggccggcgaacggttttagagctagaaatagcaagttaaaataaggctagtccgttatcaacttgaaaaagtggcaccgagtcggtgctgtggcccgcgctccggcactcgccggccg

SEQ ID NO: 1231 - RNA, 121 nt, synthetic construct
  source 1..121: mol_type = other RNA
gggtccgcggccggcgaacggttttagagctagaaatagcaagttaaaataaggctagtccgttatcaacttgaaaaagtggcaccgagtcggtgcctcgagtcggaccactcgccggccg

SEQ ID NO: 1232 - RNA, 136 nt, synthetic construct
  source 1..136: mol_type = other RNA
gggtccgcggccggcgaacggttttagagctagaaatagcaagttaaaataaggctagtccgttatcaacttgaaaaagtggcaccgagtcggtgcggtaacgtaatacaaggaaacatgagacactcgccggccg

SEQ ID NO: 1233 - RNA, 131 nt, synthetic construct
  source 1..131: mol_type = other RNA
gggtccgcggccggcgaacggttttagagctagaaatagcaagttaaaataaggctagtccgttatcaacttgaaaaagtggcaccgagtcggtgctgcgtattcctagatagctccacactcgccggccg

SEQ ID NO: 1234 - RNA, 141 nt, synthetic construct
  source 1..141: mol_type = other RNA
gggtccgcggccggcgaacggttttagagctagaaatagcaagttaaaataaggctagtccgttatcaacttgaaaaagtggcaccgagtcggtgcaccgttaccgccgaacgacctcgcgggctcaacactcgccggccg

SEQ ID NO: 1235 - RNA, 116 nt, synthetic construct
  source 1..116: mol_type = other RNA
gggtccgcggccggcgaacggttttagagctagaaatagcaagttaaaataaggctagtccgttatcaacttgaaaaagtggcaccgagtcggtgccatagctgcttcgccggccg

SEQ ID NO: 1236 - RNA, 124 nt, synthetic construct
  source 1..124: mol_type = other RNA
gggtccgcggccggcgaacggttttagagctagaaatagcaagttaaaataaggctagtccgttatcaacttgaaaaagtggcaccgagtcggtgctaagtcaaatgagacttttcgccggccg

SEQ ID NO: 1237 - RNA, 141 nt, synthetic construct
  source 1..141: mol_type = other RNA
gggtccgcggccggcgaacggttttagagctagaaatagcaagttaaaataaggctagtccgttatcaacttgaaaaagtggcaccgagtcggtgccgcagtcacagggagtcgcgaccgttgctgcattatcgccggccg

SEQ ID NO: 1238 - RNA, 124 nt, synthetic construct
  source 1..124: mol_type = other RNA
gggtccgcggccggcgaacggttttagagctagaaatagcaagttaaaataaggctagtccgttatcaacttgaaaaagtggcaccgagtcggtgcggacgcggacgccgggtatcgccggccg

SEQ ID NO: 1239 - RNA, 141 nt, synthetic construct
  source 1..141: mol_type = other RNA
gggtccgcggccggcgaacggttttagagctagaaatagcaagttaaaataaggctagtccgttatcaacttgaaaaagtggcaccgagtcggtgccccctaggtagccagaagggcgaaaccacgtgctatcgccggccg

SEQ ID NO: 1240 - RNA, 134 nt, synthetic construct
  source 1..134: mol_type = other RNA
gggtccgcggccggcgaacggttttagagctagaaatagcaagttaaaataaggctagtccgttatcaacttgaaaaagtggcaccgagtcggtgcacgccctcgagcacccaggcgacccctatcgccggccg

SEQ ID NO: 1241 - RNA, 134 nt, synthetic construct
  source 1..134: mol_type = other RNA
gggtccgcggccggcgaacggttttagagctagaaatagcaagttaaaataaggctagtccgttatcaacttgaaaaagtggcaccgagtcggtgctctgcaacgatggaatcaacacactatatcgccggccg

SEQ ID NO: 1242 - RNA, 126 nt, synthetic construct
  source 1..126: mol_type = other RNA
gggtccgcggccggcgaacggttttagagctagaaatagcaagttaaaataaggctagtccgttatcaacttgaaaaagtggcaccgagtcggtgcgtatcggggtaatgcatatatcgccggccg

SEQ ID NO: 1243 - RNA, 141 nt, synthetic construct
  source 1..141: mol_type = other RNA
gggtccgcggccggcgaacggttttagagctagaaatagcaagttaaaataaggctagtccgttatcaacttgaaaaagtggcaccgagtcggtgcttctcaaagagactttgttaagggtaccgctgatatcgccggccg

SEQ ID NO: 1244 - RNA, 136 nt, synthetic construct
  source 1..136: mol_type = other RNA
gggtccgcggccggcgaacggttttagagctagaaatagcaagttaaaataaggctagtccgttatcaacttgaaaaagtggcaccgagtcggtgccactattacaggaaattgagtaactgggcttcgccggccg

SEQ ID NO: 1245 - RNA, 124 nt, synthetic construct
  source 1..124: mol_type = other RNA
gggtccgcggccggcgaacggttttagagctagaaatagcaagttaaaataaggctagtccgttatcaacttgaaaaagtggcaccgagtcggtgcttctacgccggtttctgatcgccggccg

SEQ ID NO: 1246 - RNA, 128 nt, synthetic construct
  source 1..128: mol_type = other RNA
gggtccgcggccggcgaacggttttagagctagaaatagcaagttaaaataaggctagtccgttatcaacttgaaaaagtggcaccgagtcggtgcttggagtttgctctgtgtatgatcgccggccg

SEQ ID NO: 1247 - RNA, 141 nt, synthetic construct
  source 1..141: mol_type = other RNA
gggtccgcggccggcgaacggttttagagctagaaatagcaagttaaaataaggctagtccgttatcaacttgaaaaagtggcaccgagtcggtgcgaccgccgtagagtacaatgactcacgcggctcgatcgccggccg

SEQ ID NO: 1248 - RNA, 136 nt, synthetic construct
  source 1..136: mol_type = other RNA
gggtccgcggccggcgaacggttttagagctagaaatagcaagttaaaataaggctagtccgttatcaacttgaaaaagtggcaccgagtcggtgccggcggatcgcgcccctggcgcggggccgatcgccggccg

SEQ ID NO: 1249 - RNA, 121 nt, synthetic construct
  source 1..121: mol_type = other RNA
gggtccgcggccggcgaacggttttagagctagaaatagcaagttaaaataaggctagtccgttatcaacttgaaaaagtggcaccgagtcggtgctgcacgcggggccgatcgccggccg

SEQ ID NO: 1250 - RNA, 141 nt, synthetic construct
  source 1..141: mol_type = other RNA
gggtccgcggccggcgaacggttttagagctagaaatagcaagttaaaataaggctagtccgttatcaacttgaaaaagtggcaccgagtcggtgcgtcggcctgcacgccggccacgcccggggcgccgatcgccggccg

SEQ ID NO: 1251 - RNA, 134 nt, synthetic construct
  source 1..134: mol_type = other RNA
gggtccgcggccggcgaacggttttagagctagaaatagcaagttaaaataaggctagtccgttatcaacttgaaaaagtggcaccgagtcggtgcaagccctgcgcagcggtccgtccgccgatcgccggccg

SEQ ID NO: 1252 - RNA, 126 nt, synthetic construct
  source 1..126: mol_type = other RNA
gggtccgcggccggcgaacggttttagagctagaaatagcaagttaaaataaggctagtccgttatcaacttgaaaaagtggcaccgagtcggtgcgcctggccgggcctcaccgatcgccggccg

SEQ ID NO: 1253 - RNA, 129 nt, synthetic construct
  source 1..129: mol_type = other RNA
gggtccgcggccggcgaacggttttagagctagaaatagcaagttaaaataaggctagtccgttatcaacttgaaaaagtggcaccgagtcggtgcgggtctgatgcccgagaccacgatcgccggccg

SEQ ID NO: 1254 - RNA, 121 nt, synthetic construct
  source 1..121: mol_type = other RNA
gggtccgcggccggcgaacggttttagagctagaaatagcaagttaaaataaggctagtccgttatcaacttgaaaaagtggcaccgagtcggtgctgccgcacggcggcttcgccggccg

SEQ ID NO: 1255 - RNA, 128 nt, synthetic construct
  source 1..128: mol_type = other RNA
gggtccgcggccggcgaacggttttagagctagaaatagcaagttaaaataaggctagtccgttatcaacttgaaaaagtggcaccgagtcggtgcaggaacatcaagtgctagaagatcgccggccg

SEQ ID NO: 1256 - RNA, 128 nt, synthetic construct
  source 1..128: mol_type = other RNA
gggtccgcggccggcgaacggttttagagctagaaatagcaagttaaaataaggctagtccgttatcaacttgaaaaagtggcaccgagtcggtgcgcctcgcgggcggcccgggtcatcgccggccg

SEQ ID NO: 1257 - RNA, 126 nt, synthetic construct
  source 1..126: mol_type = other RNA
gggtccgcggccggcgaacggttttagagctagaaatagcaagttaaaataaggctagtccgttatcaacttgaaaaagtggcaccgagtcggtgcacgggacatttgttatctcatcgccggccg

SEQ ID NO: 1258 - RNA, 141 nt, synthetic construct
  source 1..141: mol_type = other RNA
gggtccgcggccggcgaacggttttagagctagaaatagcaagttaaaataaggctagtccgttatcaacttgaaaaagtggcaccgagtcggtgcggatggctaattatctgtttacccgtcacaaatcatcgccggccg

SEQ ID NO: 1259 - RNA, 134 nt, synthetic construct
  source 1..134: mol_type = other RNA
gggtccgcggccggcgaacggttttagagctagaaatagcaagttaaaataaggctagtccgttatcaacttgaaaaagtggcaccgagtcggtgcccaggacaaggaacgattgaatggtgcatcgccggccg

SEQ ID NO: 1260 - RNA, 136 nt, synthetic construct
  source 1..136: mol_type = other RNA
gggtccgcggccggcgaacggttttagagctagaaatagcaagttaaaataaggctagtccgttatcaacttgaaaaagtggcaccgagtcggtgcgcccacccgtccggcggacggcctcctgcatcgccggccg

SEQ ID NO: 1261 - RNA, 144 nt, synthetic construct
  source 1..144: mol_type = other RNA
gggtccgcggccggcgaacggttttagagctagaaatagcaagttaaaataaggctagtccgttatcaacttgaaaaagtggcaccgagtcggtgcggatgaggccgaggcaggcagcatcggaccatcatgcatcgccggccg

SEQ ID NO: 1262 - RNA, 128 nt, synthetic construct
  source 1..128: mol_type = other RNA
gggtccgcggccggcgaacggttttagagctagaaatagcaagttaaaataaggctagtccgttatcaacttgaaaaagtggcaccgagtcggtgctttccggcgcgcagatcgggcatcgccggccg

SEQ ID NO: 1263 - RNA, 126 nt, synthetic construct
  source 1..126: mol_type = other RNA
gggtccgcggccggcgaacggttttagagctagaaatagcaagttaaaataaggctagtccgttatcaacttgaaaaagtggcaccgagtcggtgccgccccgcggggcgctcgcatcgccggccg

SEQ ID NO: 1264 - RNA, 121 nt, synthetic construct
  source 1..121: mol_type = other RNA
gggtccgcggccggcgaacggttttagagctagaaatagcaagttaaaataaggctagtccgttatcaacttgaaaaagtggcaccgagtcggtgcgagcccagcatagcatcgccggccg

SEQ ID NO: 1265 - RNA, 134 nt, synthetic construct
  source 1..134: mol_type = other RNA
gggtccgcggccggcgaacggttttagagctagaaatagcaagttaaaataaggctagtccgttatcaacttgaaaaagtggcaccgagtcggtgcggcctgtggctacgggcggcgggcagcatcgccggccg

SEQ ID NO: 1266 - RNA, 128 nt, synthetic construct
  source 1..128: mol_type = other RNA
gggtccgcggccggcgaacggttttagagctagaaatagcaagttaaaataaggctagtccgttatcaacttgaaaaagtggcaccgagtcggtgcactatacggaccgagtccgccatcgccggccg

SEQ ID NO: 1267 - RNA, 121 nt, synthetic construct
  source 1..121: mol_type = other RNA
gggtccgcggccggcgaacggttttagagctagaaatagcaagttaaaataaggctagtccgttatcaacttgaaaaagtggcaccgagtcggtgcgttacacaagtagcttcgccggccg

SEQ ID NO: 1268 - RNA, 121 nt, synthetic construct
  source 1..121: mol_type = other RNA
gggtccgcggccggcgaacggttttagagctagaaatagcaagttaaaataaggctagtccgttatcaacttgaaaaagtggcaccgagtcggtgcacgcgcgttaccccatcgccggccg

SEQ ID NO: 1269 - RNA, 141 nt, synthetic construct
  source 1..141: mol_type = other RNA
gggtccgcggccggcgaacggttttagagctagaaatagcaagttaaaataaggctagtccgttatcaacttgaaaaagtggcaccgagtcggtgctgttgacttaacgccatgacctggtgctgtcaccatcgccggccg

SEQ ID NO: 1270 - RNA, 131 nt, synthetic construct
  source 1..131: mol_type = other RNA
gggtccgcggccggcgaacggttttagagctagaaatagcaagttaaaataaggctagtccgttatcaacttgaaaaagtggcaccgagtcggtgcagttcgcttccatagcatttaaccatcgccggccg

SEQ ID NO: 1271 - RNA, 128 nt, synthetic construct
  source 1..128: mol_type = other RNA
gggtccgcggccggcgaacggttttagagctagaaatagcaagttaaaataaggctagtccgttatcaacttgaaaaagtggcaccgagtcggtgctatctaacaatgaagttgcacatcgccggccg

SEQ ID NO: 1272 - RNA, 116 nt, synthetic construct
  source 1..116: mol_type = other RNA
gggtccgcggccggcgaacggttttagagctagaaatagcaagttaaaataaggctagtccgttatcaacttgaaaaagtggcaccgagtcggtgcgggcctagcttcgccggccg

SEQ ID NO: 1273 - RNA, 131 nt, synthetic construct
  source 1..131: mol_type = other RNA
gggtccgcggccggcgaacggttttagagctagaaatagcaagttaaaataaggctagtccgttatcaacttgaaaaagtggcaccgagtcggtgcatgcgtccacgcgcccaggctgtaatcgccggccg

SEQ ID NO: 1274 - RNA, 128 nt, synthetic construct
  source 1..128: mol_type = other RNA
gggtccgcggccggcgaacggttttagagctagaaatagcaagttaaaataaggctagtccgttatcaacttgaaaaagtggcaccgagtcggtgcagtcataccacgcacatcataatcgccggccg

SEQ ID NO: 1275 - RNA, 146 nt, synthetic construct
  source 1..146: mol_type = other RNA
gggtccgcggccggcgaacggttttagagctagaaatagcaagttaaaataaggctagtccgttatcaacttgaaaaagtggcaccgagtcggtgctacttcttgaatgtaattaccaaatacgttagctatggaatcgccggccg

SEQ ID NO: 1276 - RNA, 141 nt, synthetic construct
  source 1..141: mol_type = other RNA
gggtccgcggccggcgaacggttttagagctagaaatagcaagttaaaataaggctagtccgttatcaacttgaaaaagtggcaccgagtcggtgccgccgcgggctgggcccgggcgcgggcgggcggaatcgccggccg

SEQ ID NO: 1277 - RNA, 126 nt, synthetic construct
  source 1..126: mol_type = other RNA
gggtccgcggccggcgaacggttttagagctagaaatagcaagttaaaataaggctagtccgttatcaacttgaaaaagtggcaccgagtcggtgcccggagggctccgaccggaatcgccggccg

SEQ ID NO: 1278 - RNA, 134 nt, synthetic construct
  source 1..134: mol_type = other RNA
gggtccgcggccggcgaacggttttagagctagaaatagcaagttaaaataaggctagtccgttatcaacttgaaaaagtggcaccgagtcggtgcatcaagcgacgcacgcgtgcctccagaatcgccggccg

SEQ ID NO: 1279 - RNA, 124 nt, synthetic construct
  source 1..124: mol_type = other RNA
gggtccgcggccggcgaacggttttagagctagaaatagcaagttaaaataaggctagtccgttatcaacttgaaaaagtggcaccgagtcggtgccggtccgcaccgcaagaatcgccggccg

SEQ ID NO: 1280 - RNA, 128 nt, synthetic construct
  source 1..128: mol_type = other RNA
gggtccgcggccggcgaacggttttagagctagaaatagcaagttaaaataaggctagtccgttatcaacttgaaaaagtggcaccgagtcggtgcgcggtatcacctacgacatcaatcgccggccg

SEQ ID NO: 1281 - RNA, 144 nt, synthetic construct
  source 1..144: mol_type = other RNA
gggtccgcggccggcgaacggttttagagctagaaatagcaagttaaaataaggctagtccgttatcaacttgaaaaagtggcaccgagtcggtgcttcgcccgggcccgtagagaaggctcggcgtgcggcaatcgccggccg

SEQ ID NO: 1282 - RNA, 116 nt, synthetic construct
  source 1..116: mol_type = other RNA
gggtccgcggccggcgaacggttttagagctagaaatagcaagttaaaataaggctagtccgttatcaacttgaaaaagtggcaccgagtcggtgcgcccctacaatcgccggccg

SEQ ID NO: 1283 - RNA, 146 nt, synthetic construct
  source 1..146: mol_type = other RNA
gggtccgcggccggcgaacggttttagagctagaaatagcaagttaaaataaggctagtccgttatcaacttgaaaaagtggcaccgagtcggtgccaatgttcgtataaccgtccctagtgtgtctgttactaaatcgccggccg

SEQ ID NO: 1284 - RNA, 134 nt, synthetic construct
  source 1..134: mol_type = other RNA
gggtccgcggccggcgaacggttttagagctagaaatagcaagttaaaataaggctagtccgttatcaacttgaaaaagtggcaccgagtcggtgccgcgaggacaacctttccaattcggaaatcgccggccg

SEQ ID NO: 1285 - RNA, 116 nt, synthetic construct
  source 1..116: mol_type = other RNA
gggtccgcggccggcgaacggttttagagctagaaatagcaagttaaaataaggctagtccgttatcaacttgaaaaagtggcaccgagtcggtgcgaagcggaaatcgccggccg

SEQ ID NO: 1286 - RNA, 141 nt, synthetic construct
  source 1..141: mol_type = other RNA
gggtccgcggccggcgaacggttttagagctagaaatagcaagttaaaataaggctagtccgttatcaacttgaaaaagtggcaccgagtcggtgctagatcaatttccgagatcactgtcatctcaagcttcgccggccg

SEQ ID NO: 1287 - RNA, 124 nt, synthetic construct
  source 1..124: mol_type = other RNA
gggtccgcggccggcgaacggttttagagctagaaatagcaagttaaaataaggctagtccgttatcaacttgaaaaagtggcaccgagtcggtgcaatttcaagatcctgccttcgccggccg

SEQ ID NO: 1288 - RNA, 124 nt, synthetic construct
  source 1..124: mol_type = other RNA
gggtccgcggccggcgaacggttttagagctagaaatagcaagttaaaataaggctagtccgttatcaacttgaaaaagtggcaccgagtcggtgcggcctggacgccaggccttcgccggccg

SEQ ID NO: 1289 - RNA, 121 nt, synthetic construct
  source 1..121: mol_type = other RNA
gggtccgcggccggcgaacggttttagagctagaaatagcaagttaaaataaggctagtccgttatcaacttgaaaaagtggcaccgagtcggtgcgtcacctacgcgccttcgccggccg

SEQ ID NO: 1290 - RNA, 124 nt, synthetic construct
  source 1..124: mol_type = other RNA
gggtccgcggccggcgaacggttttagagctagaaatagcaagttaaaataaggctagtccgttatcaacttgaaaaagtggcaccgagtcggtgctcggccggtcttccgccttcgccggccg

SEQ ID NO: 1291 - RNA, 128 nt, synthetic construct
  source 1..128: mol_type = other RNA
gggtccgcggccggcgaacggttttagagctagaaatagcaagttaaaataaggctagtccgttatcaacttgaaaaagtggcaccgagtcggtgcccgccggctcatcgaaccgccttcgccggccg

SEQ ID NO: 1292 - RNA, 121 nt, synthetic construct
  source 1..121: mol_type = other RNA
gggtccgcggccggcgaacggttttagagctagaaatagcaagttaaaataaggctagtccgttatcaacttgaaaaagtggcaccgagtcggtgccgggccaccgccctttcgccggccg

SEQ ID NO: 1293 - RNA, 131 nt, synthetic construct
  source 1..131: mol_type = other RNA
gggtccgcggccggcgaacggttttagagctagaaatagcaagttaaaataaggctagtccgttatcaacttgaaaaagtggcaccgagtcggtgcgcaaggtgtttgtgcaccttacctttcgccggccg

SEQ ID NO: 1294 - RNA, 136 nt, synthetic construct
  source 1..136: mol_type = other RNA
gggtccgcggccggcgaacggttttagagctagaaatagcaagttaaaataaggctagtccgttatcaacttgaaaaagtggcaccgagtcggtgctctgcacaagagatattctgttctccatgttcgccggccg

SEQ ID NO: 1295 - RNA, 131 nt, synthetic construct
  source 1..131: mol_type = other RNA
gggtccgcggccggcgaacggttttagagctagaaatagcaagttaaaataaggctagtccgttatcaacttgaaaaagtggcaccgagtcggtgctaaaggatcacatataggtcgtggttcgccggccg

SEQ ID NO: 1296 - RNA, 126 nt, synthetic construct
  source 1..126: mol_type = other RNA
gggtccgcggccggcgaacggttttagagctagaaatagcaagttaaaataaggctagtccgttatcaacttgaaaaagtggcaccgagtcggtgcgccggcggaagccggctggttcgccggccg

SEQ ID NO: 1297 - RNA, 136 nt, synthetic construct
  source 1..136: mol_type = other RNA
gggtccgcggccggcgaacggttttagagctagaaatagcaagttaaaataaggctagtccgttatcaacttgaaaaagtggcaccgagtcggtgcgtgatccaagtgctcgacactcccacgggttcgccggccg

SEQ ID NO: 1298 - RNA, 131 nt, synthetic construct
  source 1..131: mol_type = other RNA
gggtccgcggccggcgaacggttttagagctagaaatagcaagttaaaataaggctagtccgttatcaacttgaaaaagtggcaccgagtcggtgcgggtgcggcgcaagggccgcctcgttcgccggccg

SEQ ID NO: 1299 - RNA, 121 nt, synthetic construct
  source 1..121: mol_type = other RNA
gggtccgcggccggcgaacggttttagagctagaaatagcaagttaaaataaggctagtccgttatcaacttgaaaaagtggcaccgagtcggtgcttgccctatcggcgttcgccggccg

SEQ ID NO: 1300 - RNA, 121 nt, synthetic construct
  source 1..121: mol_type = other RNA
gggtccgcggccggcgaacggttttagagctagaaatagcaagttaaaataaggctagtccgttatcaacttgaaaaagtggcaccgagtcggtgcgccggggcatgggcttcgccggccg

SEQ ID NO: 1301 - RNA, 126 nt, synthetic construct
  source 1..126: mol_type = other RNA
gggtccgcggccggcgaacggttttagagctagaaatagcaagttaaaataaggctagtccgttatcaacttgaaaaagtggcaccgagtcggtgcagctcagattatagtgagcttcgccggccg

SEQ ID NO: 1302 - RNA, 126 nt, synthetic construct
  source 1..126: mol_type = other RNA
gggtccgcggccggcgaacggttttagagctagaaatagcaagttaaaataaggctagtccgttatcaacttgaaaaagtggcaccgagtcggtgcgtcgcgctgttccgcgagcttcgccggccg

SEQ ID NO: 1303 - RNA, 121 nt, synthetic construct
  source 1..121: mol_type = other RNA
gggtccgcggccggcgaacggttttagagctagaaatagcaagttaaaataaggctagtccgttatcaacttgaaaaagtggcaccgagtcggtgcacgaccgagggtccttcgccggccg

SEQ ID NO: 1304 - RNA, 121 nt, synthetic construct
  source 1..121: mol_type = other RNA
gggtccgcggccggcgaacggttttagagctagaaatagcaagttaaaataaggctagtccgttatcaacttgaaaaagtggcaccgagtcggtgcttgagcgatgcatattcgccggccg

SEQ ID NO: 1305 - RNA, 126 nt, synthetic construct
  source 1..126: mol_type = other RNA
gggtccgcggccggcgaacggttttagagctagaaatagcaagttaaaataaggctagtccgttatcaacttgaaaaagtggcaccgagtcggtgcggtccaggcaagacgctgattcgccggccg

SEQ ID NO: 1306 - RNA, 121 nt, synthetic construct
  source 1..121: mol_type = other RNA
gggtccgcggccggcgaacggttttagagctagaaatagcaagttaaaataaggctagtccgttatcaacttgaaaaagtggcaccgagtcggtgcagtaactacgcagattcgccggccg

SEQ ID NO: 1307 - RNA, 121 nt, synthetic construct
  source 1..121: mol_type = other RNA
gggtccgcggccggcgaacggttttagagctagaaatagcaagttaaaataaggctagtccgttatcaacttgaaaaagtggcaccgagtcggtgcttgccccattggcattcgccggccg

SEQ ID NO: 1308 - RNA, 136 nt, synthetic construct
  source 1..136: mol_type = other RNA
gggtccgcggccggcgaacggttttagagctagaaatagcaagttaaaataaggctagtccgttatcaacttgaaaaagtggcaccgagtcggtgctgtgcccgagggagaatcgaacacatgaattcgccggccg

SEQ ID NO: 1309 - RNA, 131 nt, synthetic construct
  source 1..131: mol_type = other RNA
gggtccgcggccggcgaacggttttagagctagaaatagcaagttaaaataaggctagtccgttatcaacttgaaaaagtggcaccgagtcggtgccgaaggaggggttcctcgcggagcgtcgccggccg

SEQ ID NO: 1310 - RNA, 131 nt, synthetic construct
  source 1..131: mol_type = other RNA
gggtccgcggccggcgaacggttttagagctagaaatagcaagttaaaataaggctagtccgttatcaacttgaaaaagtggcaccgagtcggtgcctgaggggccgtgttgcgacccacgtcgccggccg

SEQ ID NO: 1311 - RNA, 131 nt, synthetic construct
  source 1..131: mol_type = other RNA
gggtccgcggccggcgaacggttttagagctagaaatagcaagttaaaataaggctagtccgttatcaacttgaaaaagtggcaccgagtcggtgctagggaagagtcgaatatatctctctcgccggccg

SEQ ID NO: 1312 - RNA, 136 nt, synthetic construct
  source 1..136: mol_type = other RNA
gggtccgcggccggcgaacggttttagagctagaaatagcaagttaaaataaggctagtccgttatcaacttgaaaaagtggcaccgagtcggtgcaacccgcagagggacgggtcgttcgccctctcgccggccg

SEQ ID NO: 1313 - RNA, 136 nt, synthetic construct
  source 1..136: mol_type = other RNA
gggtccgcggccggcgaacggttttagagctagaaatagcaagttaaaataaggctagtccgttatcaacttgaaaaagtggcaccgagtcggtgcgaagaataaacgttggatctcacatcatgctcgccggccg

SEQ ID NO: 1314 - RNA, 131 nt, synthetic construct
  source 1..131: mol_type = other RNA
gggtccgcggccggcgaacggttttagagctagaaatagcaagttaaaataaggctagtccgttatcaacttgaaaaagtggcaccgagtcggtgccgaagtggtgtagctgacatcgcgctcgccggccg

SEQ ID NO: 1315 - RNA, 131 nt, synthetic construct
  source 1..131: mol_type = other RNA
gggtccgcggccggcgaacggttttagagctagaaatagcaagttaaaataaggctagtccgttatcaacttgaaaaagtggcaccgagtcggtgcggaagcggagactctatgcttcgcctcgccggccg

SEQ ID NO: 1316 - RNA, 126 nt, synthetic construct
  source 1..126: mol_type = other RNA
gggtccgcggccggcgaacggttttagagctagaaatagcaagttaaaataaggctagtccgttatcaacttgaaaaagtggcaccgagtcggtgcaaaggggacaccggggtccctcgccggccg

SEQ ID NO: 1317 - RNA, 136 nt, synthetic construct
  source 1..136: mol_type = other RNA
gggtccgcggccggcgaacggttttagagctagaaatagcaagttaaaataaggctagtccgttatcaacttgaaaaagtggcaccgagtcggtgcggcgccgaaggtcccaggtggaccgggccctcgccggccg

SEQ ID NO: 1318 - RNA, 126 nt, synthetic construct
  source 1..126: mol_type = other RNA
gggtccgcggccggcgaacggttttagagctagaaatagcaagttaaaataaggctagtccgttatcaacttgaaaaagtggcaccgagtcggtgcaggtcgcctgtgcgcgcccctcgccggccg

SEQ ID NO: 1319 - RNA, 136 nt, synthetic construct
  source 1..136: mol_type = other RNA
gggtccgcggccggcgaacggttttagagctagaaatagcaagttaaaataaggctagtccgttatcaacttgaaaaagtggcaccgagtcggtgccgacaacaaagattatgtcacttctctacctcgccggccg

SEQ ID NO: 1320 - RNA, 121 nt, synthetic construct
  source 1..121: mol_type = other RNA
gggtccgcggccggcgaacggttttagagctagaaatagcaagttaaaataaggctagtccgttatcaacttgaaaaagtggcaccgagtcggtgcaggtcactcccgacctcgccggccg

SEQ ID NO: 1321 - RNA, 126 nt, synthetic construct
  source 1..126: mol_type = other RNA
gggtccgcggccggcgaacggttttagagctagaaatagcaagttaaaataaggctagtccgttatcaacttgaaaaagtggcaccgagtcggtgcatcccgcgagtgaccgcgactcgccggccg

SEQ ID NO: 1322 - RNA, 131 nt, synthetic construct
  source 1..131: mol_type = other RNA
gggtccgcggccggcgaacggttttagagctagaaatagcaagttaaaataaggctagtccgttatcaacttgaaaaagtggcaccgagtcggtgccttagggtctcagtaacccacttcatcgccggccg

SEQ ID NO: 1323 - RNA, 121 nt, synthetic construct
  source 1..121: mol_type = other RNA
gggtccgcggccggcgaacggttttagagctagaaatagcaagttaaaataaggctagtccgttatcaacttgaaaaagtggcaccgagtcggtgcgggccggtgggccaatcgccggccg

SEQ ID NO: 1324 - RNA, 126 nt, synthetic construct
  source 1..126: mol_type = other RNA
gggtccgcggccggcgaacggttttagagctagaaatagcaagttaaaataaggctagtccgttatcaacttgaaaaagtggcaccgagtcggtgcgttggtgtgcactacgacaatcgccggccg

SEQ ID NO: 1325 - RNA, 126 nt, synthetic construct
  source 1..126: mol_type = other RNA
gggtccgcggccggcgaacggttttagagctagaaatagcaagttaaaataaggctagtccgttatcaacttgaaaaagtggcaccgagtcggtgcagtagctgtacccaactaaatcgccggccg

SEQ ID NO: 1326 - RNA, 118 nt, synthetic construct
  source 1..118: mol_type = other RNA
gggtccgcggccggcgaacggttttagagctagaaatagcaagttaaaataaggctagtccgttatcaacttgaaaaagtggcaccgagtcggtgcacgctccccagatcgccggccg

SEQ ID NO: 1327 - RNA, 120 nt, synthetic construct
  source 1..120: mol_type = other RNA
gggtccgcggccggcgaacggttttagagctagaaatagcaagttaaaataaggctagtccgttatcaacttgaaaaagtggcaccgagtcggtgcagacgctccccagatcgccggccg

SEQ ID NO: 1328 - RNA, 122 nt, synthetic construct
  source 1..122: mol_type = other RNA
gggtccgcggccggcgaacggttttagagctagaaatagcaagttaaaataaggctagtccgttatcaacttgaaaaagtggcaccgagtcggtgcccagacgctccccagatcgccggccg

SEQ ID NO: 1329 - RNA, 124 nt, synthetic construct
  source 1..124: mol_type = other RNA
gggtccgcggccggcgaacggttttagagctagaaatagcaagttaaaataaggctagtccgttatcaacttgaaaaagtggcaccgagtcggtgccgccagacgctccccagatcgccggccg

SEQ ID NO: 1330 - RNA, 126 nt, synthetic construct
  source 1..126: mol_type = other RNA
gggtccgcggccggcgaacggttttagagctagaaatagcaagttaaaataaggctagtccgttatcaacttgaaaaagtggcaccgagtcggtgccgcgccagacgctccccagatcgccggccg

SEQ ID NO: 1331 - RNA, 118 nt, synthetic construct
  source 1..118: mol_type = other RNA
gggtccgcggccggcgaacggttttagagctagaaatagcaagttaaaataaggctagtccgttatcaacttgaaaaagtggcaccgagtcggtgcccgaaaaagcggtcgccggccg

SEQ ID NO: 1332 - RNA, 120 nt, synthetic construct
  source 1..120: mol_type = other RNA
gggtccgcggccggcgaacggttttagagctagaaatagcaagttaaaataaggctagtccgttatcaacttgaaaaagtggcaccgagtcggtgcccccgaaaaagcggtcgccggccg

SEQ ID NO: 1333 - RNA, 122 nt, synthetic construct
  source 1..122: mol_type = other RNA
gggtccgcggccggcgaacggttttagagctagaaatagcaagttaaaataaggctagtccgttatcaacttgaaaaagtggcaccgagtcggtgcatccccgaaaaagcggtcgccggccg

SEQ ID NO: 1334 - RNA, 124 nt, synthetic construct
  source 1..124: mol_type = other RNA
gggtccgcggccggcgaacggttttagagctagaaatagcaagttaaaataaggctagtccgttatcaacttgaaaaagtggcaccgagtcggtgcggatccccgaaaaagcggtcgccggccg

SEQ ID NO: 1335 - RNA, 126 nt, synthetic construct
  source 1..126: mol_type = other RNA
gggtccgcggccggcgaacggttttagagctagaaatagcaagttaaaataaggctagtccgttatcaacttgaaaaagtggcaccgagtcggtgccgggatccccgaaaaagcggtcgccggccg

SEQ ID NO: 1336 - RNA, 118 nt, synthetic construct
  source 1..118: mol_type = other RNA
gggtccgcggccggcgaacggttttagagctagaaatagcaagttaaaataaggctagtccgttatcaacttgaaaaagtggcaccgagtcggtgctccaaaccgccgtcgccggccg

SEQ ID NO: 1337 - RNA, 120 nt, synthetic construct
  source 1..120: mol_type = other RNA
gggtccgcggccggcgaacggttttagagctagaaatagcaagttaaaataaggctagtccgttatcaacttgaaaaagtggcaccgagtcggtgctatccaaaccgccgtcgccggccg

SEQ ID NO: 1338 - RNA, 122 nt, synthetic construct
  source 1..122: mol_type = other RNA
gggtccgcggccggcgaacggttttagagctagaaatagcaagttaaaataaggctagtccgttatcaacttgaaaaagtggcaccgagtcggtgcaatatccaaaccgccgtcgccggccg

SEQ ID NO: 1339 - RNA, 124 nt, synthetic construct
  source 1..124: mol_type = other RNA
gggtccgcggccggcgaacggttttagagctagaaatagcaagttaaaataaggctagtccgttatcaacttgaaaaagtggcaccgagtcggtgctaaatatccaaaccgccgtcgccggccg

SEQ ID NO: 1340 - RNA, 126 nt, synthetic construct
  source 1..126: mol_type = other RNA
gggtccgcggccggcgaacggttttagagctagaaatagcaagttaaaataaggctagtccgttatcaacttgaaaaagtggcaccgagtcggtgcaataaatatccaaaccgccgtcgccggccg

SEQ ID NO: 1341 - RNA, 20 nt, synthetic construct
  source 1..20: mol_type = other RNA
gctcgaagggtccttgtagc

SEQ ID NO: 1342 - RNA, 17 nt, synthetic construct
  source 1..17: mol_type = other RNA
acaaggacccttcgagc

SEQ ID NO: 1343 - RNA, 16 nt, synthetic construct
  source 1..16: mol_type = other RNA
acaaggacccttcgag

SEQ ID NO: 1344 - RNA, 15 nt, synthetic construct
  source 1..15: mol_type = other RNA
acaaggacccttcga

SEQ ID NO: 1345 - RNA, 14 nt, synthetic construct
  source 1..14: mol_type = other RNA
acaaggacccttcg

SEQ ID NO: 1346 - RNA, 13 nt, synthetic construct
  source 1..13: mol_type = other RNA
acaaggacccttc

SEQ ID NO: 1347 - RNA, 12 nt, synthetic construct
  source 1..12: mol_type = other RNA
acaaggaccctt

SEQ ID NO: 1348 - RNA, 11 nt, synthetic construct
  source 1..11: mol_type = other RNA
acaaggaccct

SEQ ID NO: 1349 - RNA, 10 nt, synthetic construct
  source 1..10: mol_type = other RNA
acaaggaccc

SEQ ID NO: 1350-1356 - skipped (7 entries)

SEQ ID NO: 1357 - RNA, 144 nt, synthetic construct
  source 1..144: mol_type = other RNA
gctcgaagggtccttgtagcgttttagagctagaaatagcaagttaaaataaggctagtccgttatcaacttgaaaaagtggcaccgagtcggtgcggcttgtcgacgacggcggtctccgtcgtcaggatcatacaaggaccc

SEQ ID NO: 1358 - RNA, 147 nt, synthetic construct
  source 1..147: mol_type = other RNA
gctcgaagggtccttgtagcgttttagagctagaaatagcaagttaaaataaggctagtccgttatcaacttgaaaaagtggcaccgagtcggtgcggcttgtcgacgacggcggtctccgtcgtcaggatcatacaaggacccttc

SEQ ID NO: 1359 - RNA, 20 nt, synthetic construct
  source 1..20: mol_type = other RNA
cagtttgcccatccacgtca

SEQ ID NO: 1360 - RNA, 17 nt, synthetic construct
  source 1..17: mol_type = other RNA
cgtggatgggcaaactg

SEQ ID NO: 1361 - RNA, 16 nt, synthetic construct
  source 1..16: mol_type = other RNA
cgtggatgggcaaact

SEQ ID NO: 1362 - RNA, 15 nt, synthetic construct
  source 1..15: mol_type = other RNA
cgtggatgggcaaac

SEQ ID NO: 1363 - RNA, 14 nt, synthetic construct
  source 1..14: mol_type = other RNA
cgtggatgggcaaa

SEQ ID NO: 1364 - RNA, 13 nt, synthetic construct
  source 1..13: mol_type = other RNA
cgtggatgggcaa

SEQ ID NO: 1365 - RNA, 12 nt, synthetic construct
  source 1..12: mol_type = other RNA
cgtggatgggca

SEQ ID NO: 1366 - RNA, 11 nt, synthetic construct
  source 1..11: mol_type = other RNA
cgtggatgggc

SEQ ID NO: 1367 - RNA, 10 nt, synthetic construct
  source 1..10: mol_type = other RNA
cgtggatggg

SEQ ID NO: 1368-1374 - skipped (7 entries)

SEQ ID NO: 1375 - RNA, 142 nt, synthetic construct
  source 1..142: mol_type = other RNA
cagtttgcccatccacgtcagttttagagctagaaatagcaagttaaaataaggctagtccgttatcaacttgaaaaagtggcaccgagtcggtgcatgatcctgacgacggagaccgccgtcgtcgacaagcccgtggatg

SEQ ID NO: 1376 - RNA, 144 nt, synthetic construct
  source 1..144: mol_type = other RNA
cagtttgcccatccacgtcagttttagagctagaaatagcaagttaaaataaggctagtccgttatcaacttgaaaaagtggcaccgagtcggtgcatgatcctgacgacggagaccgccgtcgtcgacaagcccgtggatggg

SEQ ID NO: 1377 - RNA, 146 nt, synthetic construct
  source 1..146: mol_type = other RNA
cagtttgcccatccacgtcagttttagagctagaaatagcaagttaaaataaggctagtccgttatcaacttgaaaaagtggcaccgagtcggtgcatgatcctgacgacggagaccgccgtcgtcgacaagcccgtggatgggca

SEQ ID NO: 1378 - RNA, 154 nt, synthetic construct
  source 1..154: mol_type = other RNA
caccgcagtttgcccatccacgtcagttttagagctagaaatagcaagttaaaataaggctagtccgttatcaacttgaaaaagtggcaccgagtcggtgcatgatcctgacgacggagaccgccgtcgtcgacaagcccgtggatgttttttt

SEQ ID NO: 1379 - RNA, 156 nt, synthetic construct
  source 1..156: mol_type = other RNA
caccgcagtttgcccatccacgtcagttttagagctagaaatagcaagttaaaataaggctagtccgttatcaacttgaaaaagtggcaccgagtcggtgcatgatcctgacgacggagaccgccgtcgtcgacaagcccgtggatgggttttttt

SEQ ID NO: 1380 - RNA, 158 nt, synthetic construct
  source 1..158: mol_type = other RNA
caccgcagtttgcccatccacgtcagttttagagctagaaatagcaagttaaaataaggctagtccgttatcaacttgaaaaagtggcaccgagtcggtgcatgatcctgacgacggagaccgccgtcgtcgacaagcccgtggatgggcattttttt

SEQ ID NO: 1381 - RNA, 20 nt, synthetic construct
  source 1..20: mol_type = other RNA
cgtggaggatggaacacgga

SEQ ID NO: 1382 - RNA, 17 nt, synthetic construct
  source 1..17: mol_type = other RNA
gtgttccatcctccacg

SEQ ID NO: 1383 - RNA, 16 nt, synthetic construct
  source 1..16: mol_type = other RNA
gtgttccatcctccac

SEQ ID NO: 1384 - RNA, 15 nt, synthetic construct
  source 1..15: mol_type = other RNA
gtgttccatcctcca

SEQ ID NO: 1385 - RNA, 14 nt, synthetic construct
  source 1..14: mol_type = other RNA
gtgttccatcctcc

SEQ ID NO: 1386 - RNA, 13 nt, synthetic construct
  source 1..13: mol_type = other RNA
gtgttccatcctc

SEQ ID NO: 1387 - RNA, 12 nt, synthetic construct
  source 1..12: mol_type = other RNA
gtgttccatcct

SEQ ID NO: 1388 - RNA, 11 nt, synthetic construct
  source 1..11: mol_type = other RNA
gtgttccatcc

SEQ ID NO: 1389 - RNA, 10 nt, synthetic construct
  source 1..10: mol_type = other RNA
gtgttccatc

SEQ ID NO: 1390-1396 - skipped (7 entries)

SEQ ID NO: 1397 - RNA, 142 nt, synthetic construct
  source 1..142: mol_type = other RNA
cgtggaggatggaacacggagttttagagctagaaatagcaagttaaaataaggctagtccgttatcaacttgaaaaagtggcaccgagtcggtgcatgatcctgacgacggagaccgccgtcgtcgacaagccgtgttcca

SEQ ID NO: 1398 - RNA, 144 nt, synthetic construct
  source 1..144: mol_type = other RNA
cgtggaggatggaacacggagttttagagctagaaatagcaagttaaaataaggctagtccgttatcaacttgaaaaagtggcaccgagtcggtgcatgatcctgacgacggagaccgccgtcgtcgacaagccgtgttccatc

SEQ ID NO: 1399 - RNA, 146 nt, synthetic construct
  source 1..146: mol_type = other RNA
cgtggaggatggaacacggagttttagagctagaaatagcaagttaaaataaggctagtccgttatcaacttgaaaaagtggcaccgagtcggtgcatgatcctgacgacggagaccgccgtcgtcgacaagccgtgttccatcct

SEQ ID NO: 1400 - RNA, 154 nt, synthetic construct
  source 1..154: mol_type = other RNA
caccgcgtggaggatggaacacggagttttagagctagaaatagcaagttaaaataaggctagtccgttatcaacttgaaaaagtggcaccgagtcggtgcatgatcctgacgacggagaccgccgtcgtcgacaagccgtgttccattttttt

SEQ ID NO: 1401 - RNA, 156 nt, synthetic construct
  source 1..156: mol_type = other RNA
caccgcgtggaggatggaacacggagttttagagctagaaatagcaagttaaaataaggctagtccgttatcaacttgaaaaagtggcaccgagtcggtgcatgatcctgacgacggagaccgccgtcgtcgacaagccgtgttccatcttttttt

SEQ ID NO: 1402 - RNA, 158 nt, synthetic construct
  source 1..158: mol_type = other RNA
caccgcgtggaggatggaacacggagttttagagctagaaatagcaagttaaaataaggctagtccgttatcaacttgaaaaagtggcaccgagtcggtgcatgatcctgacgacggagaccgccgtcgtcgacaagccgtgttccatcctttttttt

SEQ ID NO: 1403 - RNA, 20 nt, synthetic construct
  source 1..20: mol_type = other RNA
gcactttgcgaaccaacgat

SEQ ID NO: 1404 - RNA, 17 nt, synthetic construct
  source 1..17: mol_type = other RNA
gttggttcgcaaagtgc

SEQ ID NO: 1405 - RNA, 16 nt, synthetic construct
  source 1..16: mol_type = other RNA
gttggttcgcaaagtg

SEQ ID NO: 1406 - RNA, 15 nt, synthetic construct
  source 1..15: mol_type = other RNA
gttggttcgcaaagt

SEQ ID NO: 1407 - RNA, 14 nt, synthetic construct
  source 1..14: mol_type = other RNA
gttggttcgcaaag

SEQ ID NO: 1408 - RNA, 13 nt, synthetic construct
  source 1..13: mol_type = other RNA
gttggttcgcaaa

SEQ ID NO: 1409 - RNA, 12 nt, synthetic construct
  source 1..12: mol_type = other RNA
gttggttcgcaa

SEQ ID NO: 1410 - RNA, 11 nt, synthetic construct
  source 1..11: mol_type = other RNA
gttggttcgca

SEQ ID NO: 1411 - RNA, 10 nt, synthetic construct
  source 1..10: mol_type = other RNA
gttggttcgc

SEQ ID NO: 1412-1418 - skipped (7 entries)

SEQ ID NO: 1419 - RNA, 142 nt, synthetic construct
  source 1..142: mol_type = other RNA
gcactttgcgaaccaacgatgttttagagctagaaatagcaagttaaaataaggctagtccgttatcaacttgaaaaagtggcaccgagtcggtgcatgatcctgacgacggagaccgccgtcgtcgacaagccgttggttc

SEQ ID NO: 1420 - RNA, 144 nt, synthetic construct
  source 1..144: mol_type = other RNA
gcactttgcgaaccaacgatgttttagagctagaaatagcaagttaaaataaggctagtccgttatcaacttgaaaaagtggcaccgagtcggtgcatgatcctgacgacggagaccgccgtcgtcgacaagccgttggttcgc

SEQ ID NO: 1421 - RNA, 148 nt, synthetic construct
  source 1..148: mol_type = other RNA
gcactttgcgaaccaacgatgttttagagctagaaatagcaagttaaaataaggctagtccgttatcaacttgaaaaagtggcaccgagtcggtgcatgatcctgacgacggagaccgccgtcgtcgacaagccgttggttcgcaaag

SEQ ID NO: 1422 - RNA, 153 nt, synthetic construct
  source 1..153: mol_type = other RNA
caccgcactttgcgaaccaacgatgttttagagctagaaatagcaagttaaaataaggctagtccgttatcaacttgaaaaagtggcaccgagtcggtgcatgatcctgacgacggagaccgccgtcgtcgacaagccgttggttcttttttt

SEQ ID NO: 1423 - RNA, 155 nt, synthetic construct
  source 1..155: mol_type = other RNA
caccgcactttgcgaaccaacgatgttttagagctagaaatagcaagttaaaataaggctagtccgttatcaacttgaaaaagtggcaccgagtcggtgcatgatcctgacgacggagaccgccgtcgtcgacaagccgttggttcgcttttttt

SEQ ID NO: 1424 - RNA, 159 nt, synthetic construct
  source 1..159: mol_type = other RNA
caccgcactttgcgaaccaacgatgttttagagctagaaatagcaagttaaaataaggctagtccgttatcaacttgaaaaagtggcaccgagtcggtgcatgatcctgacgacggagaccgccgtcgtcgacaagccgttggttcgcaaagttttttt

SEQ ID NO: 1425 - RNA, 146 nt, synthetic construct
  source 1..146: mol_type = other RNA
gcactttgcgaaccaacgatgttttagagctagaaatagcaagttaaaataaggctagtccgttatcaacttgaaaaagtggcaccgagtcggtgcggtaatagcatacagttgccggttgcaaatcttggaaagttggttcgcaa

SEQ ID NO: 1426 - RNA, 146 nt, synthetic construct
  source 1..146: mol_type = other RNA
gcactttgcgaaccaacgatgttttagagctagaaatagcaagttaaaataaggctagtccgttatcaacttgaaaaagtggcaccgagtcggtgctgtaatccgagtacgcttcgtgataaaccggaacaatagttggttcgcaa

SEQ ID NO: 1427 - RNA, 146 nt, synthetic construct
  source 1..146: mol_type = other RNA
gcactttgcgaaccaacgatgttttagagctagaaatagcaagttaaaataaggctagtccgttatcaacttgaaaaagtggcaccgagtcggtgcgataagtattgatatggaacgcatagggtggtgcgatagttggttcgcaa

SEQ ID NO: 1428 - RNA, 146 nt, synthetic construct
  source 1..146: mol_type = other RNA
gcactttgcgaaccaacgatgttttagagctagaaatagcaagttaaaataaggctagtccgttatcaacttgaaaaagtggcaccgagtcggtgctgcggtgaataggttgaaagaaggatactgtagacgaagttggttcgcaa

SEQ ID NO: 1429 - RNA, 146 nt, synthetic construct
  source 1..146: mol_type = other RNA
gcactttgcgaaccaacgatgttttagagctagaaatagcaagttaaaataaggctagtccgttatcaacttgaaaaagtggcaccgagtcggtgcgtggaaatcatccgccatgaagtattcacaccataacagttggttcgcaa

SEQ ID NO: 1430 - RNA, 146 nt, synthetic construct
  source 1..146: mol_type = other RNA
gcactttgcgaaccaacgatgttttagagctagaaatagcaagttaaaataaggctagtccgttatcaacttgaaaaagtggcaccgagtcggtgctggatcggcaatatgtttgcatgggcttcgtatacatagttggttcgcaa

SEQ ID NO: 1431 - RNA, 146 nt, synthetic construct
  source 1..146: mol_type = other RNA
gcactttgcgaaccaacgatgttttagagctagaaatagcaagttaaaataaggctagtccgttatcaacttgaaaaagtggcaccgagtcggtgcggtaatcgcaaatgccaaataccatgtagacacggtaagttggttcgcaa

SEQ ID NO: 1432 - RNA, 146 nt, synthetic construct
  source 1..146: mol_type = other RNA
gcactttgcgaaccaacgatgttttagagctagaaatagcaagttaaaataaggctagtccgttatcaacttgaaaaagtggcaccgagtcggtgcttctgttggagtgcccgttggtatatgtaccttgtatagttggttcgcaa

SEQ ID NO: 1433 - RNA, 146 nt, synthetic construct
  source 1..146: mol_type = other RNA
gcactttgcgaaccaacgatgttttagagctagaaatagcaagttaaaataaggctagtccgttatcaacttgaaaaagtggcaccgagtcggtgctccctctggacgtgtaaatttccaagtatacgcagtaagttggttcgcaa

SEQ ID NO: 1434 - RNA, 146 nt, synthetic construct
  source 1..146: mol_type = other RNA
gcactttgcgaaccaacgatgttttagagctagaaatagcaagttaaaataaggctagtccgttatcaacttgaaaaagtggcaccgagtcggtgcggcggtgccatatcctgaccgtataccctgtacatacagttggttcgcaa

SEQ ID NO: 1435 - RNA, 146 nt, synthetic construct
  source 1..146: mol_type = other RNA
gcactttgcgaaccaacgatgttttagagctagaaatagcaagttaaaataaggctagtccgttatcaacttgaaaaagtggcaccgagtcggtgctgtccgtgcattcgagtacctgtacttgtcgagggtgagttggttcgcaa

SEQ ID NO: 1436 - RNA, 146 nt, synthetic construct
  source 1..146: mol_type = other RNA
gcactttgcgaaccaacgatgttttagagctagaaatagcaagttaaaataaggctagtccgttatcaacttgaaaaagtggcaccgagtcggtgcgctccagaatacgcctgagagagcgaaagctttcggaagttggttcgcaa

SEQ ID NO: 1437 - RNA, 146 nt, synthetic construct
  source 1..146: mol_type = other RNA
gcactttgcgaaccaacgatgttttagagctagaaatagcaagttaaaataaggctagtccgttatcaacttgaaaaagtggcaccgagtcggtgcggagcaacacgggttgagagcaattgatttctccgccagttggttcgcaa

SEQ ID NO: 1438 - RNA, 146 nt, synthetic construct
  source 1..146: mol_type = other RNA
gcactttgcgaaccaacgatgttttagagctagaaatagcaagttaaaataaggctagtccgttatcaacttgaaaaagtggcaccgagtcggtgcgtatgggcctgcacgtggtaacaagatgaggaacgtgagttggttcgcaa

SEQ ID NO: 1439 - RNA, 146 nt, synthetic construct
  source 1..146: mol_type = other RNA
gcactttgcgaaccaacgatgttttagagctagaaatagcaagttaaaataaggctagtccgttatcaacttgaaaaagtggcaccgagtcggtgcgagcccacacatactcgtgtttggttcccttgacgagagttggttcgcaa

SEQ ID NO: 1440 - RNA, 146 nt, synthetic construct
  source 1..146: mol_type = other RNA
gcactttgcgaaccaacgatgttttagagctagaaatagcaagttaaaataaggctagtccgttatcaacttgaaaaagtggcaccgagtcggtgcgagtgacaggaaaccctcgtatgtcggcgcacagtatagttggttcgcaa

SEQ ID NO: 1441 - RNA, 146 nt, synthetic construct
  source 1..146: mol_type = other RNA
gcactttgcgaaccaacgatgttttagagctagaaatagcaagttaaaataaggctagtccgttatcaacttgaaaaagtggcaccgagtcggtgcgccacaccacacccgtgagaaacgaaagattccagagagttggttcgcaa

SEQ ID NO: 1442 - RNA, 146 nt, synthetic construct
  source 1..146: mol_type = other RNA
gcactttgcgaaccaacgatgttttagagctagaaatagcaagttaaaataaggctagtccgttatcaacttgaaaaagtggcaccgagtcggtgcgtggagcacacgaggactggttctggtgtacataggtagttggttcgcaa

SEQ ID NO: 1443 - RNA, 146 nt, synthetic construct
  source 1..146: mol_type = other RNA
gcactttgcgaaccaacgatgttttagagctagaaatagcaagttaaaataaggctagtccgttatcaacttgaaaaagtggcaccgagtcggtgcgtgtgggaggtcacaacctcgagtgtcgccctccggtagttggttcgcaa

SEQ ID NO: 1444 - RNA, 146 nt, synthetic construct
  source 1..146: mol_type = other RNA
gcactttgcgaaccaacgatgttttagagctagaaatagcaagttaaaataaggctagtccgttatcaacttgaaaaagtggcaccgagtcggtgctgtgggcgtacaatactctcggccgcggacagggacgagttggttcgcaa

SEQ ID NO: 1445 - RNA, 146 nt, synthetic construct
  source 1..146: mol_type = other RNA
gcactttgcgaaccaacgatgttttagagctagaaatagcaagttaaaataaggctagtccgttatcaacttgaaaaagtggcaccgagtcggtgcgcggtggagcatacccagttccgcgcgatcgatcgtgagttggttcgcaa

SEQ ID NO: 1446 - RNA, 146 nt, synthetic construct
  source 1..146: mol_type = other RNA
gcactttgcgaaccaacgatgttttagagctagaaatagcaagttaaaataaggctagtccgttatcaacttgaaaaagtggcaccgagtcggtgcgggacggagccatgcaaatgcccgcatgcctccgagaagttggttcgcaa

SEQ ID NO: 1447 - RNA, 146 nt, synthetic construct
  source 1..146: mol_type = other RNA
gcactttgcgaaccaacgatgttttagagctagaaatagcaagttaaaataaggctagtccgttatcaacttgaaaaagtggcaccgagtcggtgcggcgcctttgccatggcgtgaacgcatagcggcagagagttggttcgcaa

SEQ ID NO: 1448 - RNA, 146 nt, synthetic construct
  source 1..146: mol_type = other RNA
gcactttgcgaaccaacgatgttttagagctagaaatagcaagttaaaataaggctagtccgttatcaacttgaaaaagtggcaccgagtcggtgcggatgaggccgaggcaggcagcatcggaccatcatgcagttggttcgcaa

SEQ ID NO: 1449 - RNA, 146 nt, synthetic construct
  source 1..146: mol_type = other RNA
gcactttgcgaaccaacgatgttttagagctagaaatagcaagttaaaataaggctagtccgttatcaacttgaaaaagtggcaccgagtcggtgcgaccgcccgttctgcatgtatgcgcaagcgtcgacgcagttggttcgcaa

SEQ ID NO: 1450 - RNA, 146 nt, synthetic construct
  source 1..146: mol_type = other RNA
gcactttgcgaaccaacgatgttttagagctagaaatagcaagttaaaataaggctagtccgttatcaacttgaaaaagtggcaccgagtcggtgcgtcaccaaggaccacggcttgggcctcgacagagctgagttggttcgcaa

SEQ ID NO: 1451 - RNA, 146 nt, synthetic construct
  source 1..146: mol_type = other RNA
gcactttgcgaaccaacgatgttttagagctagaaatagcaagttaaaataaggctagtccgttatcaacttgaaaaagtggcaccgagtcggtgctcggttcgggcgaaacccaggagacgcgtaccggaagagttggttcgcaa

SEQ ID NO: 1452 - RNA, 146 nt, synthetic construct
  source 1..146: mol_type = other RNA
gcactttgcgaaccaacgatgttttagagctagaaatagcaagttaaaataaggctagtccgttatcaacttgaaaaagtggcaccgagtcggtgcgtacagagctcggcccgagataccgccgcggtgcgccagttggttcgcaa

SEQ ID NO: 1453 - RNA, 146 nt, synthetic construct
  source 1..146: mol_type = other RNA
gcactttgcgaaccaacgatgttttagagctagaaatagcaagttaaaataaggctagtccgttatcaacttgaaaaagtggcaccgagtcggtgcgccggcaggcccgcaggcgctgttcggctcaattggcagttggttcgcaa

SEQ ID NO: 1454 - RNA, 146 nt, synthetic construct
  source 1..146: mol_type = other RNA
gcactttgcgaaccaacgatgttttagagctagaaatagcaagttaaaataaggctagtccgttatcaacttgaaaaagtggcaccgagtcggtgcgccgtgcgtcgggcgaggtgccgggagcatgtgtgacagttggttcgcaa

SEQ ID NO: 1455 - RNA, 146 nt, synthetic construct
  source 1..146: mol_type = other RNA
gcactttgcgaaccaacgatgttttagagctagaaatagcaagttaaaataaggctagtccgttatcaacttgaaaaagtggcaccgagtcggtgcgaggtgcccggtgccgctgaaagcagcgttcgcccgcagttggttcgcaa

SEQ ID NO: 1456 - RNA, 146 nt, synthetic construct
  source 1..146: mol_type = other RNA
gcactttgcgaaccaacgatgttttagagctagaaatagcaagttaaaataaggctagtccgttatcaacttgaaaaagtggcaccgagtcggtgcttcgcccgggcccgtagagaaggctcggcgtgcggcaagttggttcgcaa

SEQ ID NO: 1457 - RNA, 146 nt, synthetic construct
  source 1..146: mol_type = other RNA
gcactttgcgaaccaacgatgttttagagctagaaatagcaagttaaaataaggctagtccgttatcaacttgaaaaagtggcaccgagtcggtgcggtgacgtttcccgtccctggacgcagcgtggcgggcagttggttcgcaa

SEQ ID NO: 1458 - RNA, 146 nt, synthetic construct
  source 1..146: mol_type = other RNA
gcactttgcgaaccaacgatgttttagagctagaaatagcaagttaaaataaggctagtccgttatcaacttgaaaaagtggcaccgagtcggtgcgccatgcaggcgtaacgcggagaggtccggccgccgtagttggttcgcaa

SEQ ID NO: 1459 - RNA, 146 nt, synthetic construct
  source 1..146: mol_type = other RNA
gcactttgcgaaccaacgatgttttagagctagaaatagcaagttaaaataaggctagtccgttatcaacttgaaaaagtggcaccgagtcggtgcggcagcgtgcgcccggctgataggcggttctcgcagcagttggttcgcaa

SEQ ID NO: 1460 - RNA, 146 nt, synthetic construct
  source 1..146: mol_type = other RNA
gcactttgcgaaccaacgatgttttagagctagaaatagcaagttaaaataaggctagtccgttatcaacttgaaaaagtggcaccgagtcggtgcggcaacgcgcggcaggcggccgataaagcctgggcacagttggttcgcaa

SEQ ID NO: 1461 - RNA, 146 nt, synthetic construct
  source 1..146: mol_type = other RNA
gcactttgcgaaccaacgatgttttagagctagaaatagcaagttaaaataaggctagtccgttatcaacttgaaaaagtggcaccgagtcggtgcggaaggcccgccgacggctcgggccgcaccgcgatgcagttggttcgcaa

SEQ ID NO: 1462 - RNA, 146 nt, synthetic construct
  source 1..146: mol_type = other RNA
gcactttgcgaaccaacgatgttttagagctagaaatagcaagttaaaataaggctagtccgttatcaacttgaaaaagtggcaccgagtcggtgcgccacgcggccgagtcgctcccgggccgggtgtgcgtagttggttcgcaa

SEQ ID NO: 1463 - RNA, 146 nt, synthetic construct
  source 1..146: mol_type = other RNA
gcactttgcgaaccaacgatgttttagagctagaaatagcaagttaaaataaggctagtccgttatcaacttgaaaaagtggcaccgagtcggtgcgccgcgctccgcgcgaggtgacggtccggagtcggccagttggttcgcaa

SEQ ID NO: 1464 - RNA, 146 nt, synthetic construct
  source 1..146: mol_type = other RNA
gcactttgcgaaccaacgatgttttagagctagaaatagcaagttaaaataaggctagtccgttatcaacttgaaaaagtggcaccgagtcggtgcggtctcgtgcggaggccacgcgcgcgtggtggcgcgcagttggttcgcaa

SEQ ID NO: 1465 - RNA, 146 nt, synthetic construct
  source 1..146: mol_type = other RNA
gcactttgcgaaccaacgatgttttagagctagaaatagcaagttaaaataaggctagtccgttatcaacttgaaaaagtggcaccgagtcggtgcggccggccctcgccgccttctgggcggctcatccgccagttggttcgcaa

SEQ ID NO: 1466 - RNA, 146 nt, synthetic construct
  source 1..146: mol_type = other RNA
gcactttgcgaaccaacgatgttttagagctagaaatagcaagttaaaataaggctagtccgttatcaacttgaaaaagtggcaccgagtcggtgcgccgtcttcccgggcccgcggcctcggtcgacctggcagttggttcgcaa

SEQ ID NO: 1467 - RNA, 146 nt, synthetic construct
  source 1..146: mol_type = other RNA
gcactttgcgaaccaacgatgttttagagctagaaatagcaagttaaaataaggctagtccgttatcaacttgaaaaagtggcaccgagtcggtgctttccgggctccgcggcgcacatcccggcgccgggcgagttggttcgcaa

SEQ ID NO: 1468 - RNA, 146 nt, synthetic construct
  source 1..146: mol_type = other RNA
gcactttgcgaaccaacgatgttttagagctagaaatagcaagttaaaataaggctagtccgttatcaacttgaaaaagtggcaccgagtcggtgcgtgctcgccgggcacgtccgcgccagccgcggcttcgagttggttcgcaa

SEQ ID NO: 1469 - RNA, 146 nt, synthetic construct
  source 1..146: mol_type = other RNA
gcactttgcgaaccaacgatgttttagagctagaaatagcaagttaaaataaggctagtccgttatcaacttgaaaaagtggcaccgagtcggtgcgctgcccggcacgcgggcgtaccctgggcccgtacggagttggttcgcaa

SEQ ID NO: 1470 - RNA, 131 nt, synthetic construct
  source 1..131: mol_type = other RNA
gcactttgcgaaccaacgatgttttagagctagaaatagcaagttaaaataaggctagtccgttatcaacttgaaaaagtggcaccgagtcggtgcgcggcccacagataagaggcggagttggttcgcaa

SEQ ID NO: 1471 - RNA, 131 nt, synthetic construct
  source 1..131: mol_type = other RNA
gcactttgcgaaccaacgatgttttagagctagaaatagcaagttaaaataaggctagtccgttatcaacttgaaaaagtggcaccgagtcggtgctcgcatggacccgacggttggcagttggttcgcaa

SEQ ID NO: 1472 - RNA, 131 nt, synthetic construct
  source 1..131: mol_type = other RNA
gcactttgcgaaccaacgatgttttagagctagaaatagcaagttaaaataaggctagtccgttatcaacttgaaaaagtggcaccgagtcggtgcggcttgttgcgggtgcgctcgaagttggttcgcaa

SEQ ID NO: 1473 - RNA, 131 nt, synthetic construct
  source 1..131: mol_type = other RNA
gcactttgcgaaccaacgatgttttagagctagaaatagcaagttaaaataaggctagtccgttatcaacttgaaaaagtggcaccgagtcggtgcggttcgcaaccctgctgcgcgaagttggttcgcaa

SEQ ID NO: 1474 - RNA, 131 nt, synthetic construct
  source 1..131: mol_type = other RNA
gcactttgcgaaccaacgatgttttagagctagaaatagcaagttaaaataaggctagtccgttatcaacttgaaaaagtggcaccgagtcggtgcgtacctgtcccgcaccggccaaagttggttcgcaa

SEQ ID NO: 1475 - RNA, 131 nt, synthetic construct
  source 1..131: mol_type = other RNA
gcactttgcgaaccaacgatgttttagagctagaaatagcaagttaaaataaggctagtccgttatcaacttgaaaaagtggcaccgagtcggtgcgggaggaggccatcgccaaacgagttggttcgcaa

SEQ ID NO: 1476 - RNA, 131 nt, synthetic construct
  source 1..131: mol_type = other RNA
gcactttgcgaaccaacgatgttttagagctagaaatagcaagttaaaataaggctagtccgttatcaacttgaaaaagtggcaccgagtcggtgcgacacgtagacggctcgccgagagttggttcgcaa

SEQ ID NO: 1477 - RNA, 131 nt, synthetic construct
  source 1..131: mol_type = other RNA
gcactttgcgaaccaacgatgttttagagctagaaatagcaagttaaaataaggctagtccgttatcaacttgaaaaagtggcaccgagtcggtgcgggtctgatgcccgagaccacgagttggttcgcaa

SEQ ID NO: 1478 - RNA, 131 nt, synthetic construct
  source 1..131: mol_type = other RNA
gcactttgcgaaccaacgatgttttagagctagaaatagcaagttaaaataaggctagtccgttatcaacttgaaaaagtggcaccgagtcggtgctgcgcagagacacggactgggcagttggttcgcaa

SEQ ID NO: 1479 - RNA, 161 nt, synthetic construct
  source 1..161: mol_type = other RNA
gcactttgcgaaccaacgatgttttagagctagaaatagcaagttaaaataaggctagtccgttatcaacttgaaaaagtggcaccgagtcggtgctgatctgtggcgatacatgcgcggcccactgcgccgcccattgcacaaacgcagttggttcgcaa

SEQ ID NO: 1480 - RNA, 161 nt, synthetic construct
  source 1..161: mol_type = other RNA
gcactttgcgaaccaacgatgttttagagctagaaatagcaagttaaaataaggctagtccgttatcaacttgaaaaagtggcaccgagtcggtgcgcccgacatccatagtgaaacagccacgttgctgtggcgaccgtggcctccgagttggttcgcaa

SEQ ID NO: 1481 - RNA, 161 nt, synthetic construct
  source 1..161: mol_type = other RNA
gcactttgcgaaccaacgatgttttagagctagaaatagcaagttaaaataaggctagtccgttatcaacttgaaaaagtggcaccgagtcggtgcttggagtagcaatgcgtgtcgggttgtccgagctgcgccgtgcgtgaccgagagttggttcgcaa

SEQ ID NO: 1482 - RNA, 161 nt, synthetic construct
  source 1..161: mol_type = other RNA
gcactttgcgaaccaacgatgttttagagctagaaatagcaagttaaaataaggctagtccgttatcaacttgaaaaagtggcaccgagtcggtgctcccttgcgcggcggcaaacctgatatggctcgggaccgataccacggagcaagttggttcgcaa

SEQ ID NO: 1483 - RNA, 176 nt, synthetic construct
  source 1..176: mol_type = other RNA
gcactttgcgaaccaacgatgttttagagctagaaatagcaagttaaaataaggctagtccgttatcaacttgaaaaagtggcaccgagtcggtgcggtcctctccaccacaacggccgcaataataggtacccaggccgcactcccgttggcgccacacccaagttggttcgcaa

SEQ ID NO: 1484 - RNA, 176 nt, synthetic construct
  source 1..176: mol_type = other RNA
gcactttgcgaaccaacgatgttttagagctagaaatagcaagttaaaataaggctagtccgttatcaacttgaaaaagtggcaccgagtcggtgctggtgcagccagggtctgcttgactttcgccacccagctcttgcacactccgcgtacgacgccagcgagttggttcgcaa

SEQ ID NO: 1485 - RNA, 176 nt, synthetic construct
  source 1..176: mol_type = other RNA
gcactttgcgaaccaacgatgttttagagctagaaatagcaagttaaaataaggctagtccgttatcaacttgaaaaagtggcaccgagtcggtgctgttcctgacggctgggtagcttcgccttgcagcgtgtacatggagcttcccggcctgccacagccgagttggttcgcaa

SEQ ID NO: 1486 - RNA, 176 nt, synthetic construct
  source 1..176: mol_type = other RNA
gcactttgcgaaccaacgatgttttagagctagaaatagcaagttaaaataaggctagtccgttatcaacttgaaaaagtggcaccgagtcggtgcgacgcggaagccttcctcctgcgtagtccggtacgaccctgctgcgcagaaaggacactgcccggtaagttggttcgcaa

SEQ ID NO: 1487 - RNA, 176 nt, synthetic construct
  source 1..176: mol_type = other RNA
gcactttgcgaaccaacgatgttttagagctagaaatagcaagttaaaataaggctagtccgttatcaacttgaaaaagtggcaccgagtcggtgcgcataccacccatctcgggacaccgccgttcgcgcacgctgtggatggatgccctgatccgcgttgtagttggttcgcaa

SEQ ID NO: 1488 - RNA, 176 nt, synthetic construct
  source 1..176: mol_type = other RNA
gcactttgcgaaccaacgatgttttagagctagaaatagcaagttaaaataaggctagtccgttatcaacttgaaaaagtggcaccgagtcggtgcggtagaccgcctccggaggctcttcgagccatcccacgaagctgtccagtccgattcaggcgagaggagttggttcgcaa

SEQ ID NO: 1489 - RNA, 176 nt, synthetic construct
  source 1..176: mol_type = other RNA
gcactttgcgaaccaacgatgttttagagctagaaatagcaagttaaaataaggctagtccgttatcaacttgaaaaagtggcaccgagtcggtgcggctgcgcgggcgtccgcttgcacccttgtaacgcaatcgggcgtaaggacgcagtatcagtcggcaagttggttcgcaa

SEQ ID NO: 1490 - RNA, 176 nt, synthetic construct
  source 1..176: mol_type = other RNA
gcactttgcgaaccaacgatgttttagagctagaaatagcaagttaaaataaggctagtccgttatcaacttgaaaaagtggcaccgagtcggtgcggaagacagccgccacatatccactgcagggccaccctttcgcttcgttggccggtttcgctccgggagttggttcgcaa

SEQ ID NO: 1491 - RNA, 176 nt, synthetic construct
  source 1..176: mol_type = other RNA
gcactttgcgaaccaacgatgttttagagctagaaatagcaagttaaaataaggctagtccgttatcaacttgaaaaagtggcaccgagtcggtgcgaaatcgagcgaggttccgtcgtcggcgcaagtggtggcttcgcgtgggtgggttgcctcttgctggagttggttcgcaa

SEQ ID NO: 1492 - RNA, 191 nt, synthetic construct
  source 1..191: mol_type = other RNA
gcactttgcgaaccaacgatgttttagagctagaaatagcaagttaaaataaggctagtccgttatcaacttgaaaaagtggcaccgagtcggtgcgcgtgacctcgccgcttcaaggccgcgcacgtcgatcgtgagtagattgaggaagggctgtccttggctctgtcctcctcggagttggttcgcaa

SEQ ID NO: 1493 - RNA, 191 nt, synthetic construct
  source 1..191: mol_type = other RNA
gcactttgcgaaccaacgatgttttagagctagaaatagcaagttaaaataaggctagtccgttatcaacttgaaaaagtggcaccgagtcggtgctcccatccagtacagcccggtccgactgtgcgcgataggtgtgaaggctgagcgcgcagtatctcgagggtgtgaaggcgggagttggttcgcaa

SEQ ID NO: 1494 - RNA, 191 nt, synthetic construct
  source 1..191: mol_type = other RNA
gcactttgcgaaccaacgatgttttagagctagaaatagcaagttaaaataaggctagtccgttatcaacttgaaaaagtggcaccgagtcggtgcgatagcttggccagcaagtggcgcgcccaccggcgatcggcatcctgtgccttggcttccggtgttgccacaattggctgcaagttggttcgcaa

SEQ ID NO: 1495 - RNA, 191 nt, synthetic construct
  source 1..191: mol_type = other RNA
gcactttgcgaaccaacgatgttttagagctagaaatagcaagttaaaataaggctagtccgttatcaacttgaaaaagtggcaccgagtcggtgcggctgtgcgcgccttcgtcgcagtccgcttcgtggcagtccctgccaccctgattgggcatttctcgtggtgtctttggccaagttggttcgcaa

SEQ ID NO: 1496 - RNA, 191 nt, synthetic construct
  source 1..191: mol_type = other RNA
gcactttgcgaaccaacgatgttttagagctagaaatagcaagttaaaataaggctagtccgttatcaacttgaaaaagtggcaccgagtcggtgctgggatgaccagaagacggaccatctgccgtcggtcgacactgagttctgccgacggccctgcgcgtacgggccactcagtaagttggttcgcaa

SEQ ID NO: 1497 - RNA, 191 nt, synthetic construct
  source 1..191: mol_type = other RNA
gcactttgcgaaccaacgatgttttagagctagaaatagcaagttaaaataaggctagtccgttatcaacttgaaaaagtggcaccgagtcggtgcggctccggcgactttcgaagctccgcaagcagacgtgcaggaagaccggtttgaaacgcaacgtaccgaaccgcaggccgcgagttggttcgcaa

SEQ ID NO: 1498 - RNA, 191 nt, synthetic construct
  source 1..191: mol_type = other RNA
gcactttgcgaaccaacgatgttttagagctagaaatagcaagttaaaataaggctagtccgttatcaacttgaaaaagtggcaccgagtcggtgctccacacgggacaccggagtggcgttgccagaggcgtcgaggcaatatggcacgagtgcctctttcaaacggctcaggcgccagttggttcgcaa

SEQ ID NO: 1499 - RNA, 191 nt, synthetic construct
  source 1..191: mol_type = other RNA
gcactttgcgaaccaacgatgttttagagctagaaatagcaagttaaaataaggctagtccgttatcaacttgaaaaagtggcaccgagtcggtgcggcacggctgtgcaacgccgccgtctctgacatagcggcaaccgtagtgggtccgtacagaaggacgcgattgccgcgtatgagttggttcgcaa

SEQ ID NO: 1500 - RNA, 191 nt, synthetic construct
  source 1..191: mol_type = other RNA
gcactttgcgaaccaacgatgttttagagctagaaatagcaagttaaaataaggctagtccgttatcaacttgaaaaagtggcaccgagtcggtgcgggtgtacgctccgctctccttgacaaggcggatcccgccgccgtgatctggtctgttctgagcgagtctgacggtagtgggagttggttcgcaa

SEQ ID NO: 1501 - RNA, 191 nt, synthetic construct
  source 1..191: mol_type = other RNA
gcactttgcgaaccaacgatgttttagagctagaaatagcaagttaaaataaggctagtccgttatcaacttgaaaaagtggcaccgagtcggtgctcgctcccaggtgtcctcctcctcccagcgggtcgcgctgagccaacaaagccgaggagaatgctccaatcgtaagtcgcccagttggttcgcaa

SEQ ID NO: 1502 - RNA, 132 nt, synthetic construct
  source 1..132: mol_type = other RNA
gcactttgcgaaccaacgatgttttagagctagaaatagcaagttaaaataaggctagtccgttatcaacttgaaaaagtggcaccgagtcggtgcacaccatcatcaccatcatcgtgcgttggttcgcaa

SEQ ID NO: 1503 - RNA, 20 nt, synthetic construct
  source 1..20: mol_type = other RNA
cgcgggatccccgaaaaagc

SEQ ID NO: 1504 - RNA, 17 nt, synthetic construct
  source 1..17: mol_type = other RNA
ttttcggggatcccgcg

SEQ ID NO: 1505 - RNA, 16 nt, synthetic construct
  source 1..16: mol_type = other RNA
ttttcggggatcccgc

SEQ ID NO: 1506 - RNA, 15 nt, synthetic construct
  source 1..15: mol_type = other RNA
ttttcggggatcccg

SEQ ID NO: 1507 - RNA, 14 nt, synthetic construct
  source 1..14: mol_type = other RNA
ttttcggggatccc

SEQ ID NO: 1508 - RNA, 13 nt, synthetic construct
  source 1..13: mol_type = other RNA
ttttcggggatcc

SEQ ID NO: 1509 - RNA, 12 nt, synthetic construct
  source 1..12: mol_type = other RNA
ttttcggggatc

SEQ ID NO: 1510 - RNA, 11 nt, synthetic construct
  source 1..11: mol_type = other RNA
ttttcggggat

SEQ ID NO: 1511 - RNA, 10 nt, synthetic construct
  source 1..10: mol_type = other RNA
ttttcgggga

SEQ ID NO: 1512-1518 - skipped (7 entries)

SEQ ID NO: 1519 - RNA, 142 nt, synthetic construct
  source 1..142: mol_type = other RNA
cgcgggatccccgaaaaagcgttttagagctagaaatagcaagttaaaataaggctagtccgttatcaacttgaaaaagtggcaccgagtcggtgcatgatcctgacgacggagaccgccgtcgtcgacaagccttttcggg

SEQ ID NO: 1520 - RNA, 144 nt, synthetic construct
  source 1..144: mol_type = other RNA
cgcgggatccccgaaaaagcgttttagagctagaaatagcaagttaaaataaggctagtccgttatcaacttgaaaaagtggcaccgagtcggtgcatgatcctgacgacggagaccgccgtcgtcgacaagccttttcgggga

SEQ ID NO: 1521 - RNA, 146 nt, synthetic construct
  source 1..146: mol_type = other RNA
cgcgggatccccgaaaaagcgttttagagctagaaatagcaagttaaaataaggctagtccgttatcaacttgaaaaagtggcaccgagtcggtgcatgatcctgacgacggagaccgccgtcgtcgacaagccttttcggggatc

SEQ ID NO: 1522 - RNA, 154 nt, synthetic construct
  source 1..154: mol_type = other RNA
caccgcgcgggatccccgaaaaagcgttttagagctagaaatagcaagttaaaataaggctagtccgttatcaacttgaaaaagtggcaccgagtcggtgcatgatcctgacgacggagaccgccgtcgtcgacaagccttttcgggttttttt

SEQ ID NO: 1523 - RNA, 156 nt, synthetic construct
  source 1..156: mol_type = other RNA
caccgcgcgggatccccgaaaaagcgttttagagctagaaatagcaagttaaaataaggctagtccgttatcaacttgaaaaagtggcaccgagtcggtgcatgatcctgacgacggagaccgccgtcgtcgacaagccttttcggggattttttt

SEQ ID NO: 1524 - RNA, 158 nt, synthetic construct
  source 1..158: mol_type = other RNA
caccgcgcgggatccccgaaaaagcgttttagagctagaaatagcaagttaaaataaggctagtccgttatcaacttgaaaaagtggcaccgagtcggtgcatgatcctgacgacggagaccgccgtcgtcgacaagccttttcggggatcttttttt

SEQ ID NO: 1525 - RNA, 20 nt, synthetic construct
  source 1..20: mol_type = other RNA
aaatatccaaaccgccgaag

SEQ ID NO: 1526 - RNA, 17 nt, synthetic construct
  source 1..17: mol_type = other RNA
cggcggtttggatattt

SEQ ID NO: 1527 - RNA, 16 nt, synthetic construct
  source 1..16: mol_type = other RNA
cggcggtttggatatt

SEQ ID NO: 1528 - RNA, 15 nt, synthetic construct
  source 1..15: mol_type = other RNA
cggcggtttggatat

SEQ ID NO: 1529 - RNA, 14 nt, synthetic construct
  source 1..14: mol_type = other RNA
cggcggtttggata

SEQ ID NO: 1530 - RNA, 13 nt, synthetic construct
  source 1..13: mol_type = other RNA
cggcggtttggat

SEQ ID NO: 1531 - RNA, 12 nt, synthetic construct
  source 1..12: mol_type = other RNA
cggcggtttgga

SEQ ID NO: 1532 - RNA, 11 nt, synthetic construct
  source 1..11: mol_type = other RNA
cggcggtttgg

SEQ ID NO: 1533 - RNA, 10 nt, synthetic construct
  source 1..10: mol_type = other RNA
cggcggtttg

SEQ ID NO: 1534-1540 - skipped (7 entries)

SEQ ID NO: 1541 - RNA, 142 nt, synthetic construct
  source 1..142: mol_type = other RNA
aaatatccaaaccgccgaaggttttagagctagaaatagcaagttaaaataaggctagtccgttatcaacttgaaaaagtggcaccgagtcggtgcatgatcctgacgacggagaccgccgtcgtcgacaagcccggcggtt

SEQ ID NO: 1542 - RNA, 144 nt, synthetic construct
  source 1..144: mol_type = other RNA
aaatatccaaaccgccgaaggttttagagctagaaatagcaagttaaaataaggctagtccgttatcaacttgaaaaagtggcaccgagtcggtgcatgatcctgacgacggagaccgccgtcgtcgacaagcccggcggtttg

SEQ ID NO: 1543 - RNA, 146 nt, synthetic construct
  source 1..146: mol_type = other RNA
aaatatccaaaccgccgaaggttttagagctagaaatagcaagttaaaataaggctagtccgttatcaacttgaaaaagtggcaccgagtcggtgcatgatcctgacgacggagaccgccgtcgtcgacaagcccggcggtttgga

SEQ ID NO: 1544 - RNA, 148 nt, synthetic construct
  source 1..148: mol_type = other RNA
aaatatccaaaccgccgaaggttttagagctagaaatagcaagttaaaataaggctagtccgttatcaacttgaaaaagtggcaccgagtcggtgcatgatcctgacgacggagaccgccgtcgtcgacaagcccggcggtttggata

SEQ ID NO: 1545 - RNA, 154 nt, synthetic construct
  source 1..154: mol_type = other RNA
caccgaaatatccaaaccgccgaaggttttagagctagaaatagcaagttaaaataaggctagtccgttatcaacttgaaaaagtggcaccgagtcggtgcatgatcctgacgacggagaccgccgtcgtcgacaagcccggcggttttttttt

SEQ ID NO: 1546 - RNA, 156 nt, synthetic construct
  source 1..156: mol_type = other RNA
caccgaaatatccaaaccgccgaaggttttagagctagaaatagcaagttaaaataaggctagtccgttatcaacttgaaaaagtggcaccgagtcggtgcatgatcctgacgacggagaccgccgtcgtcgacaagcccggcggtttgttttttt

SEQ ID NO: 1547 - RNA, 158 nt, synthetic construct
  source 1..158: mol_type = other RNA
caccgaaatatccaaaccgccgaaggttttagagctagaaatagcaagttaaaataaggctagtccgttatcaacttgaaaaagtggcaccgagtcggtgcatgatcctgacgacggagaccgccgtcgtcgacaagcccggcggtttggattttttt

SEQ ID NO: 1548 - RNA, 124 nt, synthetic construct
  source 1..124: mol_type = other RNA
aaatatccaaaccgccgaaggttttagagctagaaatagcaagttaaaataaggctagtccgttatcaacttgaaaaagtggcaccgagtcggtgcccctagaactgtcttcgactcggcggtt

SEQ ID NO: 1549 - RNA, 126 nt, synthetic construct
  source 1..126: mol_type = other RNA
aaatatccaaaccgccgaaggttttagagctagaaatagcaagttaaaataaggctagtccgttatcaacttgaaaaagtggcaccgagtcggtgcccctagaactgtcttcgactcggcggtttg

SEQ ID NO: 1550 - RNA, 128 nt, synthetic construct
  source 1..128: mol_type = other RNA
aaatatccaaaccgccgaaggttttagagctagaaatagcaagttaaaataaggctagtccgttatcaacttgaaaaagtggcaccgagtcggtgcccctagaactgtcttcgactcggcggtttgga

SEQ ID NO: 1551 - RNA, 130 nt, synthetic construct
  source 1..130: mol_type = other RNA
aaatatccaaaccgccgaaggttttagagctagaaatagcaagttaaaataaggctagtccgttatcaacttgaaaaagtggcaccgagtcggtgcccctagaactgtcttcgactcggcggtttggata

SEQ ID NO: 1552 - RNA, 133 nt, synthetic construct
  source 1..133: mol_type = other RNA
aaatatccaaaccgccgaaggttttagagctagaaatagcaagttaaaataaggctagtccgttatcaacttgaaaaagtggcaccgagtcggtgcccctagaactgtcttcgactcggcggtttggatattt

SEQ ID NO: 1553 - RNA, 129 nt, synthetic construct
  source 1..129: mol_type = other RNA
aaatatccaaaccgccgaaggttttagagctagaaatagcaagttaaaataaggctagtccgttatcaacttgaaaaagtggcaccgagtcggtgcctgaaccctagaactgtcttcgactcggcggtt

SEQ ID NO: 1554 - RNA, 131 nt, synthetic construct
  source 1..131: mol_type = other RNA
aaatatccaaaccgccgaaggttttagagctagaaatagcaagttaaaataaggctagtccgttatcaacttgaaaaagtggcaccgagtcggtgcctgaaccctagaactgtcttcgactcggcggtttg

SEQ ID NO: 1555 - RNA, 133 nt, synthetic construct
  source 1..133: mol_type = other RNA
aaatatccaaaccgccgaaggttttagagctagaaatagcaagttaaaataaggctagtccgttatcaacttgaaaaagtggcaccgagtcggtgcctgaaccctagaactgtcttcgactcggcggtttgga

SEQ ID NO: 1556 - RNA, 135 nt, synthetic construct
  source 1..135: mol_type = other RNA
aaatatccaaaccgccgaaggttttagagctagaaatagcaagttaaaataaggctagtccgttatcaacttgaaaaagtggcaccgagtcggtgcctgaaccctagaactgtcttcgactcggcggtttggata

SEQ ID NO: 1557 - RNA, 138 nt, synthetic construct
  source 1..138: mol_type = other RNA
aaatatccaaaccgccgaaggttttagagctagaaatagcaagttaaaataaggctagtccgttatcaacttgaaaaagtggcaccgagtcggtgcctgaaccctagaactgtcttcgactcggcggtttggatattt

SEQ ID NO: 1558 - RNA, 134 nt, synthetic construct
  source 1..134: mol_type = other RNA
aaatatccaaaccgccgaaggttttagagctagaaatagcaagttaaaataaggctagtccgttatcaacttgaaaaagtggcaccgagtcggtgcgctccctgaaccctagaactgtcttcgactcggcggtt

SEQ ID NO: 1559 - RNA, 136 nt, synthetic construct
  source 1..136: mol_type = other RNA
aaatatccaaaccgccgaaggttttagagctagaaatagcaagttaaaataaggctagtccgttatcaacttgaaaaagtggcaccgagtcggtgcgctccctgaaccctagaactgtcttcgactcggcggtttg

SEQ ID NO: 1560 - RNA, 138 nt, synthetic construct
  source 1..138: mol_type = other RNA
aaatatccaaaccgccgaaggttttagagctagaaatagcaagttaaaataaggctagtccgttatcaacttgaaaaagtggcaccgagtcggtgcgctccctgaaccctagaactgtcttcgactcggcggtttgga

SEQ ID NO: 1561 - RNA, 140 nt, synthetic construct
  source 1..140: mol_type = other RNA
aaatatccaaaccgccgaaggttttagagctagaaatagcaagttaaaataaggctagtccgttatcaacttgaaaaagtggcaccgagtcggtgcgctccctgaaccctagaactgtcttcgactcggcggtttggata

SEQ ID NO: 1562 - RNA, 143 nt, synthetic construct
  source 1..143: mol_type = other RNA
aaatatccaaaccgccgaaggttttagagctagaaatagcaagttaaaataaggctagtccgttatcaacttgaaaaagtggcaccgagtcggtgcgctccctgaaccctagaactgtcttcgactcggcggtttggatattt

SEQ ID NO: 1563 - RNA, 131 nt, synthetic construct
  source 1..131: mol_type = other RNA
aaatatccaaaccgccgaaggttttagagctagaaatagcaagttaaaataaggctagtccgttatcaacttgaaaaagtggcaccgagtcggtgctggttaaatgctatggaagcgaactcggcggtttg

SEQ ID NO: 1564 - RNA, 146 nt, synthetic construct
  source 1..146: mol_type = other RNA
aaatatccaaaccgccgaaggttttagagctagaaatagcaagttaaaataaggctagtccgttatcaacttgaaaaagtggcaccgagtcggtgcataccctaatgacctgtcctttactctcggccggcagtatcggcggtttg

SEQ ID NO: 1565 - RNA, 134 nt, synthetic construct
  source 1..134: mol_type = other RNA
aaatatccaaaccgccgaaggttttagagctagaaatagcaagttaaaataaggctagtccgttatcaacttgaaaaagtggcaccgagtcggtgccgtatcatattaaataccaacgagatatcggcggtttg

SEQ ID NO: 1566 - RNA, 126 nt, synthetic construct
  source 1..126: mol_type = other RNA
aaatatccaaaccgccgaaggttttagagctagaaatagcaagttaaaataaggctagtccgttatcaacttgaaaaagtggcaccgagtcggtgcctctctcttctgactcgcttcggcggtttg

SEQ ID NO: 1567 - RNA, 134 nt, synthetic construct
  source 1..134: mol_type = other RNA
aaatatccaaaccgccgaaggttttagagctagaaatagcaagttaaaataaggctagtccgttatcaacttgaaaaagtggcaccgagtcggtgcttctggaggcacgcgtgcgtcgcttgatcggcggtttg

SEQ ID NO: 1568 - RNA, 124 nt, synthetic construct
  source 1..124: mol_type = other RNA
aaatatccaaaccgccgaaggttttagagctagaaatagcaagttaaaataaggctagtccgttatcaacttgaaaaagtggcaccgagtcggtgccggccaccagcgcgcgatcggcggtttg

SEQ ID NO: 1569 - RNA, 144 nt, synthetic construct
  source 1..144: mol_type = other RNA
aaatatccaaaccgccgaaggttttagagctagaaatagcaagttaaaataaggctagtccgttatcaacttgaaaaagtggcaccgagtcggtgcggcttgtcgacgacggcggtctccgtcgtcaggatcatcggcggtttg

SEQ ID NO: 1570 - RNA, 124 nt, synthetic construct
  source 1..124: mol_type = other RNA
aaatatccaaaccgccgaaggttttagagctagaaatagcaagttaaaataaggctagtccgttatcaacttgaaaaagtggcaccgagtcggtgcgcccgacagcgcgcgcatcggcggtttg

SEQ ID NO: 1571 - RNA, 131 nt, synthetic construct
  source 1..131: mol_type = other RNA
aaatatccaaaccgccgaaggttttagagctagaaatagcaagttaaaataaggctagtccgttatcaacttgaaaaagtggcaccgagtcggtgcttacagcctgggcgcgtggacgcatcggcggtttg

SEQ ID NO: 1572 - RNA, 131 nt, synthetic construct
  source 1..131: mol_type = other RNA
aaatatccaaaccgccgaaggttttagagctagaaatagcaagttaaaataaggctagtccgttatcaacttgaaaaagtggcaccgagtcggtgcccgtagtattgacacctactgccatcggcggtttg

SEQ ID NO: 1573 - RNA, 136 nt, synthetic construct
  source 1..136: mol_type = other RNA
aaatatccaaaccgccgaaggttttagagctagaaatagcaagttaaaataaggctagtccgttatcaacttgaaaaagtggcaccgagtcggtgcctccgttcttcggcgcgctgagtccgccatcggcggtttg

SEQ ID NO: 1574 - RNA, 141 nt, synthetic construct
  source 1..141: mol_type = other RNA
aaatatccaaaccgccgaaggttttagagctagaaatagcaagttaaaataaggctagtccgttatcaacttgaaaaagtggcaccgagtcggtgcactgagaggcggggcgcgggtcgttaaggccccatcggcggtttg

SEQ ID NO: 1575 - RNA, 121 nt, synthetic construct
  source 1..121: mol_type = other RNA
aaatatccaaaccgccgaaggttttagagctagaaatagcaagttaaaataaggctagtccgttatcaacttgaaaaagtggcaccgagtcggtgcggacggcccgtacatcggcggtttg

SEQ ID NO: 1576 - RNA, 121 nt, synthetic construct
  source 1..121: mol_type = other RNA
aaatatccaaaccgccgaaggttttagagctagaaatagcaagttaaaataaggctagtccgttatcaacttgaaaaagtggcaccgagtcggtgcccgcttgcgaacaatcggcggtttg

SEQ ID NO: 1577 - RNA, 136 nt, synthetic construct
  source 1..136: mol_type = other RNA
aaatatccaaaccgccgaaggttttagagctagaaatagcaagttaaaataaggctagtccgttatcaacttgaaaaagtggcaccgagtcggtgcgtaatccaagctcactaggggcacaacttgcggcggtttg

SEQ ID NO: 1578 - RNA, 146 nt, synthetic construct
  source 1..146: mol_type = other RNA
aaatatccaaaccgccgaaggttttagagctagaaatagcaagttaaaataaggctagtccgttatcaacttgaaaaagtggcaccgagtcggtgctttagtaacagacacactagggacggttatacgaacattgcggcggtttg

SEQ ID NO: 1579 - RNA, 141 nt, synthetic construct
  source 1..141: mol_type = other RNA
aaatatccaaaccgccgaaggttttagagctagaaatagcaagttaaaataaggctagtccgttatcaacttgaaaaagtggcaccgagtcggtgcccccggccccgggcccgggagcggcgggccgggtgcggcggtttg

SEQ ID NO: 1580 - RNA, 116 nt, synthetic construct
  source 1..116: mol_type = other RNA
aaatatccaaaccgccgaaggttttagagctagaaatagcaagttaaaataaggctagtccgttatcaacttgaaaaagtggcaccgagtcggtgccccgccggtgcggcggtttg

SEQ ID NO: 1581 - RNA, 136 nt, synthetic construct
  source 1..136: mol_type = other RNA
aaatatccaaaccgccgaaggttttagagctagaaatagcaagttaaaataaggctagtccgttatcaacttgaaaaagtggcaccgagtcggtgcagcccagttactcaatttcctgtaatagtgcggcggtttg

SEQ ID NO: 1582 - RNA, 134 nt, synthetic construct
  source 1..134: mol_type = other RNA
aaatatccaaaccgccgaaggttttagagctagaaatagcaagttaaaataaggctagtccgttatcaacttgaaaaagtggcaccgagtcggtgcaagcgtggcatgagtgcgccaccgtctgcggcggtttg

SEQ ID NO: 1583 - RNA, 136 nt, synthetic construct
  source 1..136: mol_type = other RNA
aaatatccaaaccgccgaaggttttagagctagaaatagcaagttaaaataaggctagtccgttatcaacttgaaaaagtggcaccgagtcggtgcctgctagggcggtacgccggcggggcgctgcggcggtttg

SEQ ID NO: 1584 - RNA, 116 nt, synthetic construct
  source 1..116: mol_type = other RNA
aaatatccaaaccgccgaaggttttagagctagaaatagcaagttaaaataaggctagtccgttatcaacttgaaaaagtggcaccgagtcggtgcagcagctatgcggcggtttg

SEQ ID NO: 1585 - RNA, 124 nt, synthetic construct
  source 1..124: mol_type = other RNA
aaatatccaaaccgccgaaggttttagagctagaaatagcaagttaaaataaggctagtccgttatcaacttgaaaaagtggcaccgagtcggtgccggggagctccgctgatgcggcggtttg

SEQ ID NO: 1586 - RNA, 134 nt, synthetic construct
  source 1..134: mol_type = other RNA
aaatatccaaaccgccgaaggttttagagctagaaatagcaagttaaaataaggctagtccgttatcaacttgaaaaagtggcaccgagtcggtgccacgagctccgccaagtgaccaccgatgcggcggtttg

SEQ ID NO: 1587 - RNA, 124 nt, synthetic construct
  source 1..124: mol_type = other RNA
aaatatccaaaccgccgaaggttttagagctagaaatagcaagttaaaataaggctagtccgttatcaacttgaaaaagtggcaccgagtcggtgccactataggtatgcaatgcggcggtttg

SEQ ID NO: 1588 - RNA, 134 nt, synthetic construct
  source 1..134: mol_type = other RNA
aaatatccaaaccgccgaaggttttagagctagaaatagcaagttaaaataaggctagtccgttatcaacttgaaaaagtggcaccgagtcggtgctgcaccattcaatcgttccttgtcctggcggcggtttg

SEQ ID NO: 1589 - RNA, 128 nt, synthetic construct
  source 1..128: mol_type = other RNA
aaatatccaaaccgccgaaggttttagagctagaaatagcaagttaaaataaggctagtccgttatcaacttgaaaaagtggcaccgagtcggtgcgggaccatatggtaccacctggcggcggtttg

SEQ ID NO: 1590 - RNA, 126 nt, synthetic construct
  source 1..126: mol_type = other RNA
aaatatccaaaccgccgaaggttttagagctagaaatagcaagttaaaataaggctagtccgttatcaacttgaaaaagtggcaccgagtcggtgcgccggagcagggccgactggcggcggtttg

SEQ ID NO: 1591 - RNA, 128 nt, synthetic construct
  source 1..128: mol_type = other RNA
aaatatccaaaccgccgaaggttttagagctagaaatagcaagttaaaataaggctagtccgttatcaacttgaaaaagtggcaccgagtcggtgccatcggccgccggcggttggggcggcggtttg

SEQ ID NO: 1592 - RNA, 121 nt, synthetic construct
  source 1..121: mol_type = other RNA
aaatatccaaaccgccgaaggttttagagctagaaatagcaagttaaaataaggctagtccgttatcaacttgaaaaagtggcaccgagtcggtgccggtccggcccggggcggcggtttg

SEQ ID NO: 1593 - RNA, 134 nt, synthetic construct
  source 1..134: mol_type = other RNA
aaatatccaaaccgccgaaggttttagagctagaaatagcaagttaaaataaggctagtccgttatcaacttgaaaaagtggcaccgagtcggtgcggcggcgggagcggcccgtacgacggggcggcggtttg

SEQ ID NO: 1594 - RNA, 141 nt, synthetic construct
  source 1..141: mol_type = other RNA
aaatatccaaaccgccgaaggttttagagctagaaatagcaagttaaaataaggctagtccgttatcaacttgaaaaagtggcaccgagtcggtgctagcacgtggtttcgcccttctggctacctaggggcggcggtttg

SEQ ID NO: 1595 - RNA, 141 nt, synthetic construct
  source 1..141: mol_type = other RNA
aaatatccaaaccgccgaaggttttagagctagaaatagcaagttaaaataaggctagtccgttatcaacttgaaaaagtggcaccgagtcggtgccgcgctagcgggaccggatgtcccctgccctacttcggcggtttg

SEQ ID NO: 1596 - RNA, 131 nt, synthetic construct
  source 1..131: mol_type = other RNA
aaatatccaaaccgccgaaggttttagagctagaaatagcaagttaaaataaggctagtccgttatcaacttgaaaaagtggcaccgagtcggtgcacggaaggcgcggtccgcgcaggggcggcggtttg

SEQ ID NO: 1597 - RNA, 141 nt, synthetic construct
  source 1..141: mol_type = other RNA
aaatatccaaaccgccgaaggttttagagctagaaatagcaagttaaaataaggctagtccgttatcaacttgaaaaagtggcaccgagtcggtgcccgccgagcggccaccctagggctggcggcgcgggcggcggtttg

SEQ ID NO: 1598 - RNA, 124 nt, synthetic construct
  source 1..124: mol_type = other RNA
aaatatccaaaccgccgaaggttttagagctagaaatagcaagttaaaataaggctagtccgttatcaacttgaaaaagtggcaccgagtcggtgcggctcctcctcgcgcgggcggcggtttg

SEQ ID NO: 1599 - RNA, 121 nt, synthetic construct
  source 1..121: mol_type = other RNA
aaatatccaaaccgccgaaggttttagagctagaaatagcaagttaaaataaggctagtccgttatcaacttgaaaaagtggcaccgagtcggtgccggctggtcgccgggcggcggtttg

SEQ ID NO: 1600 - RNA, 131 nt, synthetic construct
  source 1..131: mol_type = other RNA
aaatatccaaaccgccgaaggttttagagctagaaatagcaagttaaaataaggctagtccgttatcaacttgaaaaagtggcaccgagtcggtgcggccgggcctcgcggggcgcccgggcggcggtttg

SEQ ID NO: 1601 - RNA, 136 nt, synthetic construct
  source 1..136: mol_type = other RNA
aaatatccaaaccgccgaaggttttagagctagaaatagcaagttaaaataaggctagtccgttatcaacttgaaaaagtggcaccgagtcggtgccacgtgcgcttcgggtttcgttcgccgattcggcggtttg

SEQ ID NO: 1602 - RNA, 136 nt, synthetic construct
  source 1..136: mol_type = other RNA
aaatatccaaaccgccgaaggttttagagctagaaatagcaagttaaaataaggctagtccgttatcaacttgaaaaagtggcaccgagtcggtgcgcgcgctgaccggcgcggccaccacccgggcggcggtttg

SEQ ID NO: 1603 - RNA, 124 nt, synthetic construct
  source 1..124: mol_type = other RNA
aaatatccaaaccgccgaaggttttagagctagaaatagcaagttaaaataaggctagtccgttatcaacttgaaaaagtggcaccgagtcggtgccggcgcgctgtacgagggcggcggtttg

SEQ ID NO: 1604 - RNA, 128 nt, synthetic construct
  source 1..128: mol_type = other RNA
aaatatccaaaccgccgaaggttttagagctagaaatagcaagttaaaataaggctagtccgttatcaacttgaaaaagtggcaccgagtcggtgcaggcggttcgatgagccggcggcggcggtttg

SEQ ID NO: 1605 - RNA, 121 nt, synthetic construct
  source 1..121: mol_type = other RNA
aaatatccaaaccgccgaaggttttagagctagaaatagcaagttaaaataaggctagtccgttatcaacttgaaaaagtggcaccgagtcggtgcctttacatcagaattcggcggtttg

SEQ ID NO: 1606 - RNA, 134 nt, synthetic construct
  source 1..134: mol_type = other RNA
aaatatccaaaccgccgaaggttttagagctagaaatagcaagttaaaataaggctagtccgttatcaacttgaaaaagtggcaccgagtcggtgcggcaccggggcaccgccaccccacgcggcggcggtttg

SEQ ID NO: 1607 - RNA, 126 nt, synthetic construct
  source 1..126: mol_type = other RNA
aaatatccaaaccgccgaaggttttagagctagaaatagcaagttaaaataaggctagtccgttatcaacttgaaaaagtggcaccgagtcggtgcttccggtcggagccctccggcggcggtttg

SEQ ID NO: 1608 - RNA, 116 nt, synthetic construct
  source 1..116: mol_type = other RNA
aaatatccaaaccgccgaaggttttagagctagaaatagcaagttaaaataaggctagtccgttatcaacttgaaaaagtggcaccgagtcggtgccccttgccggcggcggtttg

SEQ ID NO: 1609 - RNA, 124 nt, synthetic construct
  source 1..124: mol_type = other RNA
aaatatccaaaccgccgaaggttttagagctagaaatagcaagttaaaataaggctagtccgttatcaacttgaaaaagtggcaccgagtcggtgcaggcaggatcttgaaattcggcggtttg

SEQ ID NO: 1610 - RNA, 136 nt, synthetic construct
  source 1..136: mol_type = other RNA
aaatatccaaaccgccgaaggttttagagctagaaatagcaagttaaaataaggctagtccgttatcaacttgaaaaagtggcaccgagtcggtgcgcacgctctcgtcggtccgccctgcgccggcggcggtttg

SEQ ID NO: 1611 - RNA, 134 nt, synthetic construct
  source 1..134: mol_type = other RNA
aaatatccaaaccgccgaaggttttagagctagaaatagcaagttaaaataaggctagtccgttatcaacttgaaaaagtggcaccgagtcggtgccgccgcgcaccgcgcgtggcgtccccggcggcggtttg

SEQ ID NO: 1612 - RNA, 121 nt, synthetic construct
  source 1..121: mol_type = other RNA
aaatatccaaaccgccgaaggttttagagctagaaatagcaagttaaaataaggctagtccgttatcaacttgaaaaagtggcaccgagtcggtgccccggcgccacccggcggcggtttg

SEQ ID NO: 1613 - RNA, 136 nt, synthetic construct
  source 1..136: mol_type = other RNA
aaatatccaaaccgccgaaggttttagagctagaaatagcaagttaaaataaggctagtccgttatcaacttgaaaaagtggcaccgagtcggtgcgctccgcatggtctctgaacggacgaccggcggcggtttg

SEQ ID NO: 1614 - RNA, 131 nt, synthetic construct
  source 1..131: mol_type = other RNA
aaatatccaaaccgccgaaggttttagagctagaaatagcaagttaaaataaggctagtccgttatcaacttgaaaaagtggcaccgagtcggtgccgcgcgcgctgcggagggtggtaggcggcggtttg

SEQ ID NO: 1615 - RNA, 128 nt, synthetic construct
  source 1..128: mol_type = other RNA
aaatatccaaaccgccgaaggttttagagctagaaatagcaagttaaaataaggctagtccgttatcaacttgaaaaagtggcaccgagtcggtgcggggccctccgacccgcctaggcggcggtttg

SEQ ID NO: 1616 - RNA, 146 nt, synthetic construct
  source 1..146: mol_type = other RNA
aaatatccaaaccgccgaaggttttagagctagaaatagcaagttaaaataaggctagtccgttatcaacttgaaaaagtggcaccgagtcggtgcggtgttcccaagcgaagtccctctggcaaaggtgaggaggcggcggtttg

SEQ ID NO: 1617 - RNA, 136 nt, synthetic construct
  source 1..136: mol_type = other RNA
aaatatccaaaccgccgaaggttttagagctagaaatagcaagttaaaataaggctagtccgttatcaacttgaaaaagtggcaccgagtcggtgcctgtacccgtagccgcggccccatccgaggcggcggtttg

SEQ ID NO: 1618 - RNA, 121 nt, synthetic construct
  source 1..121: mol_type = other RNA
aaatatccaaaccgccgaaggttttagagctagaaatagcaagttaaaataaggctagtccgttatcaacttgaaaaagtggcaccgagtcggtgccacctgcccagctgtcggcggtttg

SEQ ID NO: 1619 - RNA, 131 nt, synthetic construct
  source 1..131: mol_type = other RNA
aaatatccaaaccgccgaaggttttagagctagaaatagcaagttaaaataaggctagtccgttatcaacttgaaaaagtggcaccgagtcggtgccgactgctcggcgcagcccacaaggcggcggtttg

SEQ ID NO: 1620 - RNA, 126 nt, synthetic construct
  source 1..126: mol_type = other RNA
aaatatccaaaccgccgaaggttttagagctagaaatagcaagttaaaataaggctagtccgttatcaacttgaaaaagtggcaccgagtcggtgcccggcctggccttctaaaggcggcggtttg

SEQ ID NO: 1621 - RNA, 146 nt, synthetic construct
  source 1..146: mol_type = other RNA
aaatatccaaaccgccgaaggttttagagctagaaatagcaagttaaaataaggctagtccgttatcaacttgaaaaagtggcaccgagtcggtgcgcctgcacccttgctcctcgacgagggcccgcaccggtcgcggcggtttg

SEQ ID NO: 1622 - RNA, 116 nt, synthetic construct
  source 1..116: mol_type = other RNA
aaatatccaaaccgccgaaggttttagagctagaaatagcaagttaaaataaggctagtccgttatcaacttgaaaaagtggcaccgagtcggtgccgctcgctcgcggcggtttg

SEQ ID NO: 1623 - RNA, 134 nt, synthetic construct
  source 1..134: mol_type = other RNA
aaatatccaaaccgccgaaggttttagagctagaaatagcaagttaaaataaggctagtccgttatcaacttgaaaaagtggcaccgagtcggtgcatcccttgcttccccacgggtaagctcgcggcggtttg

SEQ ID NO: 1624 - RNA, 136 nt, synthetic construct
  source 1..136: mol_type = other RNA
aaatatccaaaccgccgaaggttttagagctagaaatagcaagttaaaataaggctagtccgttatcaacttgaaaaagtggcaccgagtcggtgcgcgcggcgtctactcctcgcctctacctcgcggcggtttg

SEQ ID NO: 1625 - RNA, 134 nt, synthetic construct
  source 1..134: mol_type = other RNA
aaatatccaaaccgccgaaggttttagagctagaaatagcaagttaaaataaggctagtccgttatcaacttgaaaaagtggcaccgagtcggtgcgcaatgcaccgccgtgggcgccgtatcgcggcggtttg

SEQ ID NO: 1626 - RNA, 124 nt, synthetic construct
  source 1..124: mol_type = other RNA
aaatatccaaaccgccgaaggttttagagctagaaatagcaagttaaaataaggctagtccgttatcaacttgaaaaagtggcaccgagtcggtgccggtgttcgggaagatcgcggcggtttg

SEQ ID NO: 1627 - RNA, 121 nt, synthetic construct
  source 1..121: mol_type = other RNA
aaatatccaaaccgccgaaggttttagagctagaaatagcaagttaaaataaggctagtccgttatcaacttgaaaaagtggcaccgagtcggtgccgggccccgcgtgcgcggcggtttg

SEQ ID NO: 1628 - RNA, 141 nt, synthetic construct
  source 1..141: mol_type = other RNA
aaatatccaaaccgccgaaggttttagagctagaaatagcaagttaaaataaggctagtccgttatcaacttgaaaaagtggcaccgagtcggtgctaatgcagcaacggtcgcgactccctgtgactgcgcggcggtttg

SEQ ID NO: 1629 - RNA, 141 nt, synthetic construct
  source 1..141: mol_type = other RNA
aaatatccaaaccgccgaaggttttagagctagaaatagcaagttaaaataaggctagtccgttatcaacttgaaaaagtggcaccgagtcggtgcgggtgccatcttcctgggtagaggcgggacatgcgcggcggtttg

SEQ ID NO: 1630 - RNA, 126 nt, synthetic construct
  source 1..126: mol_type = other RNA
aaatatccaaaccgccgaaggttttagagctagaaatagcaagttaaaataaggctagtccgttatcaacttgaaaaagtggcaccgagtcggtgctgcgagcgccccgcggggcgcggcggtttg

SEQ ID NO: 1631 - RNA, 141 nt, synthetic construct
  source 1..141: mol_type = other RNA
aaatatccaaaccgccgaaggttttagagctagaaatagcaagttaaaataaggctagtccgttatcaacttgaaaaagtggcaccgagtcggtgcggccgatgccagtgacccgttcaacgggccgggcgcggcggtttg

SEQ ID NO: 1632 - RNA, 141 nt, synthetic construct
  source 1..141: mol_type = other RNA
aaatatccaaaccgccgaaggttttagagctagaaatagcaagttaaaataaggctagtccgttatcaacttgaaaaagtggcaccgagtcggtgccgcggcggccggcaccgcgtcgcgcgctggcggcgcggcggtttg

SEQ ID NO: 1633 - RNA, 141 nt, synthetic construct
  source 1..141: mol_type = other RNA
aaatatccaaaccgccgaaggttttagagctagaaatagcaagttaaaataaggctagtccgttatcaacttgaaaaagtggcaccgagtcggtgcttccgcccgcccgcgcccgggcccagcccgcggcgcggcggtttg

SEQ ID NO: 1634 - RNA, 134 nt, synthetic construct
  source 1..134: mol_type = other RNA
aaatatccaaaccgccgaaggttttagagctagaaatagcaagttaaaataaggctagtccgttatcaacttgaaaaagtggcaccgagtcggtgctttccgaattggaaaggttgtcctcgcgcggcggtttg

SEQ ID NO: 1635 - RNA, 124 nt, synthetic construct
  source 1..124: mol_type = other RNA
aaatatccaaaccgccgaaggttttagagctagaaatagcaagttaaaataaggctagtccgttatcaacttgaaaaagtggcaccgagtcggtgcggcaccccggcgtgcgcgcggcggtttg

SEQ ID NO: 1636 - RNA, 131 nt, synthetic construct
  source 1..131: mol_type = other RNA
aaatatccaaaccgccgaaggttttagagctagaaatagcaagttaaaataaggctagtccgttatcaacttgaaaaagtggcaccgagtcggtgcgccaggccccgaccgctggagcgcgcggcggtttg

SEQ ID NO: 1637 - RNA, 128 nt, synthetic construct
  source 1..128: mol_type = other RNA
aaatatccaaaccgccgaaggttttagagctagaaatagcaagttaaaataaggctagtccgttatcaacttgaaaaagtggcaccgagtcggtgccgacctattgggacgcggagcgcggcggtttg

SEQ ID NO: 1638 - RNA, 141 nt, synthetic construct
  source 1..141: mol_type = other RNA
aaatatccaaaccgccgaaggttttagagctagaaatagcaagttaaaataaggctagtccgttatcaacttgaaaaagtggcaccgagtcggtgcccgcgcgtgccaggccccgacgggaggccccagcgcggcggtttg

SEQ ID NO: 1639 - RNA, 121 nt, synthetic construct
  source 1..121: mol_type = other RNA
aaatatccaaaccgccgaaggttttagagctagaaatagcaagttaaaataaggctagtccgttatcaacttgaaaaagtggcaccgagtcggtgcccggtagcacgtccgcggcggtttg

SEQ ID NO: 1640 - RNA, 116 nt, synthetic construct
  source 1..116: mol_type = other RNA
aaatatccaaaccgccgaaggttttagagctagaaatagcaagttaaaataaggctagtccgttatcaacttgaaaaagtggcaccgagtcggtgcccgtcctccgcggcggtttg

SEQ ID NO: 1641 - RNA, 136 nt, synthetic construct
  source 1..136: mol_type = other RNA
aaatatccaaaccgccgaaggttttagagctagaaatagcaagttaaaataaggctagtccgttatcaacttgaaaaagtggcaccgagtcggtgctcggccccgcgccaggggcgcgatccgccgcggcggtttg

SEQ ID NO: 1642 - RNA, 126 nt, synthetic construct
  source 1..126: mol_type = other RNA
aaatatccaaaccgccgaaggttttagagctagaaatagcaagttaaaataaggctagtccgttatcaacttgaaaaagtggcaccgagtcggtgcgggcgcacatcggcggcccgcggcggtttg

SEQ ID NO: 1643 - RNA, 124 nt, synthetic construct
  source 1..124: mol_type = other RNA
aaatatccaaaccgccgaaggttttagagctagaaatagcaagttaaaataaggctagtccgttatcaacttgaaaaagtggcaccgagtcggtgcgcccgctcccgccgcccgcggcggtttg

SEQ ID NO: 1644 - RNA, 124 nt, synthetic construct
  source 1..124: mol_type = other RNA
aaatatccaaaccgccgaaggttttagagctagaaatagcaagttaaaataaggctagtccgttatcaacttgaaaaagtggcaccgagtcggtgcttcttgcggtgcggaccgcggcggtttg

SEQ ID NO: 1645 - RNA, 131 nt, synthetic construct
  source 1..131: mol_type = other RNA
aaatatccaaaccgccgaaggttttagagctagaaatagcaagttaaaataaggctagtccgttatcaacttgaaaaagtggcaccgagtcggtgcgcatgcacaggcacaatgtctgtttcggcggtttg

SEQ ID NO: 1646 - RNA, 146 nt, synthetic construct
  source 1..146: mol_type = other RNA
aaatatccaaaccgccgaaggttttagagctagaaatagcaagttaaaataaggctagtccgttatcaacttgaaaaagtggcaccgagtcggtgccggcagactcgcgcgtgggccgggccccgtccgggcgacgcggcggtttg

SEQ ID NO: 1647 - RNA, 141 nt, synthetic construct
  source 1..141: mol_type = other RNA
aaatatccaaaccgccgaaggttttagagctagaaatagcaagttaaaataaggctagtccgttatcaacttgaaaaagtggcaccgagtcggtgcgcctcccgctcacactccaaccggctgcgggcacgcggcggtttg

SEQ ID NO: 1648 - RNA, 131 nt, synthetic construct
  source 1..131: mol_type = other RNA
aaatatccaaaccgccgaaggttttagagctagaaatagcaagttaaaataaggctagtccgttatcaacttgaaaaagtggcaccgagtcggtgcgggccgaaccggacctacggccacgcggcggtttg

SEQ ID NO: 1649 - RNA, 126 nt, synthetic construct
  source 1..126: mol_type = other RNA
aaatatccaaaccgccgaaggttttagagctagaaatagcaagttaaaataaggctagtccgttatcaacttgaaaaagtggcaccgagtcggtgccccgtcgcggaggagggtagcggcggtttg

SEQ ID NO: 1650 - RNA, 141 nt, synthetic construct
  source 1..141: mol_type = other RNA
aaatatccaaaccgccgaaggttttagagctagaaatagcaagttaaaataaggctagtccgttatcaacttgaaaaagtggcaccgagtcggtgcgtgttgagcccgcgaggtcgttcggcggtaacggtcggcggtttg

SEQ ID NO: 1651 - RNA, 126 nt, synthetic construct
  source 1..126: mol_type = other RNA
aaatatccaaaccgccgaaggttttagagctagaaatagcaagttaaaataaggctagtccgttatcaacttgaaaaagtggcaccgagtcggtgcatgcagacctgccacgctagcggcggtttg

SEQ ID NO: 1652 - RNA, 131 nt, synthetic construct
  source 1..131: mol_type = other RNA
aaatatccaaaccgccgaaggttttagagctagaaatagcaagttaaaataaggctagtccgttatcaacttgaaaaagtggcaccgagtcggtgcccggctccgtagcgatcgaagctagcggcggtttg

SEQ ID NO: 1653 - RNA, 124 nt, synthetic construct
  source 1..124: mol_type = other RNA
aaatatccaaaccgccgaaggttttagagctagaaatagcaagttaaaataaggctagtccgttatcaacttgaaaaagtggcaccgagtcggtgcgacgctcggaccggatagcggcggtttg

SEQ ID NO: 1654 - RNA, 131 nt, synthetic construct
  source 1..131: mol_type = other RNA
aaatatccaaaccgccgaaggttttagagctagaaatagcaagttaaaataaggctagtccgttatcaacttgaaaaagtggcaccgagtcggtgcggcagcgggctcggggacccgtgagcggcggtttg

SEQ ID NO: 1655 - RNA, 126 nt, synthetic construct
  source 1..126: mol_type = other RNA
aaatatccaaaccgccgaaggttttagagctagaaatagcaagttaaaataaggctagtccgttatcaacttgaaaaagtggcaccgagtcggtgcgggactacactagggcggagcggcggtttg

SEQ ID NO: 1656 - RNA, 121 nt, synthetic construct
  source 1..121: mol_type = other RNA
aaatatccaaaccgccgaaggttttagagctagaaatagcaagttaaaataaggctagtccgttatcaacttgaaaaagtggcaccgagtcggtgcagaacggccaaaggtcggcggtttg

SEQ ID NO: 1657 - RNA, 121 nt, synthetic construct
  source 1..121: mol_type = other RNA
aaatatccaaaccgccgaaggttttagagctagaaatagcaagttaaaataaggctagtccgttatcaacttgaaaaagtggcaccgagtcggtgcgtggtccgactcgagcggcggtttg

SEQ ID NO: 1658 - RNA, 136 nt, synthetic construct
  source 1..136: mol_type = other RNA
aaatatccaaaccgccgaaggttttagagctagaaatagcaagttaaaataaggctagtccgttatcaacttgaaaaagtggcaccgagtcggtgcgctctttcagcggctaaatcttagagcgagcggcggtttg

SEQ ID NO: 1659 - RNA, 116 nt, synthetic construct
  source 1..116: mol_type = other RNA
aaatatccaaaccgccgaaggttttagagctagaaatagcaagttaaaataaggctagtccgttatcaacttgaaaaagtggcaccgagtcggtgcccagtgtcagcggcggtttg

SEQ ID NO: 1660 - RNA, 136 nt, synthetic construct
  source 1..136: mol_type = other RNA
aaatatccaaaccgccgaaggttttagagctagaaatagcaagttaaaataaggctagtccgttatcaacttgaaaaagtggcaccgagtcggtgcgacggaggccgggatgccttcgccgctcagcggcggtttg

SEQ ID NO: 1661 - RNA, 126 nt, synthetic construct
  source 1..126: mol_type = other RNA
aaatatccaaaccgccgaaggttttagagctagaaatagcaagttaaaataaggctagtccgttatcaacttgaaaaagtggcaccgagtcggtgcggatcgtccctcaggggcagcggcggtttg

SEQ ID NO: 1662 - RNA, 116 nt, synthetic construct
  source 1..116: mol_type = other RNA
aaatatccaaaccgccgaaggttttagagctagaaatagcaagttaaaataaggctagtccgttatcaacttgaaaaagtggcaccgagtcggtgcggtgccgcagcggcggtttg

SEQ ID NO: 1663 - RNA, 126 nt, synthetic construct
  source 1..126: mol_type = other RNA
aaatatccaaaccgccgaaggttttagagctagaaatagcaagttaaaataaggctagtccgttatcaacttgaaaaagtggcaccgagtcggtgcccttatcatctttaagtttccggcggtttg

SEQ ID NO: 1664 - RNA, 131 nt, synthetic construct
  source 1..131: mol_type = other RNA
aaatatccaaaccgccgaaggttttagagctagaaatagcaagttaaaataaggctagtccgttatcaacttgaaaaagtggcaccgagtcggtgcgccgtcgtggaggcaaggcctgcgtcggcggtttg

SEQ ID NO: 1665 - RNA, 128 nt, synthetic construct
  source 1..128: mol_type = other RNA
aaatatccaaaccgccgaaggttttagagctagaaatagcaagttaaaataaggctagtccgttatcaacttgaaaaagtggcaccgagtcggtgccggtccgcgcgcagcgactttccggcggtttg

SEQ ID NO: 1666 - RNA, 124 nt, synthetic construct
  source 1..124: mol_type = other RNA
aaatatccaaaccgccgaaggttttagagctagaaatagcaagttaaaataaggctagtccgttatcaacttgaaaaagtggcaccgagtcggtgcgctacggccggagtgttccggcggtttg

SEQ ID NO: 1667 - RNA, 116 nt, synthetic construct
  source 1..116: mol_type = other RNA
aaatatccaaaccgccgaaggttttagagctagaaatagcaagttaaaataaggctagtccgttatcaacttgaaaaagtggcaccgagtcggtgctttccgcttccggcggtttg

SEQ ID NO: 1668 - RNA, 121 nt, synthetic construct
  source 1..121: mol_type = other RNA
aaatatccaaaccgccgaaggttttagagctagaaatagcaagttaaaataaggctagtccgttatcaacttgaaaaagtggcaccgagtcggtgccgtgccgcgcgtgtccggcggtttg

SEQ ID NO: 1669 - RNA, 141 nt, synthetic construct
  source 1..141: mol_type = other RNA
aaatatccaaaccgccgaaggttttagagctagaaatagcaagttaaaataaggctagtccgttatcaacttgaaaaagtggcaccgagtcggtgctcgagccgcgtgagtcattgtactctacggcggtccggcggtttg

SEQ ID NO: 1670 - RNA, 126 nt, synthetic construct
  source 1..126: mol_type = other RNA
aaatatccaaaccgccgaaggttttagagctagaaatagcaagttaaaataaggctagtccgttatcaacttgaaaaagtggcaccgagtcggtgcggactatccctccatggcgtcggcggtttg

SEQ ID NO: 1671 - RNA, 121 nt, synthetic construct
  source 1..121: mol_type = other RNA
aaatatccaaaccgccgaaggttttagagctagaaatagcaagttaaaataaggctagtccgttatcaacttgaaaaagtggcaccgagtcggtgctgctatgctgggctccggcggtttg

SEQ ID NO: 1672 - RNA, 134 nt, synthetic construct
  source 1..134: mol_type = other RNA
aaatatccaaaccgccgaaggttttagagctagaaatagcaagttaaaataaggctagtccgttatcaacttgaaaaagtggcaccgagtcggtgctaggggtcgcctgggtgctcgagggcgtcggcggtttg

SEQ ID NO: 1673 - RNA, 131 nt, synthetic construct
  source 1..131: mol_type = other RNA
aaatatccaaaccgccgaaggttttagagctagaaatagcaagttaaaataaggctagtccgttatcaacttgaaaaagtggcaccgagtcggtgccggtaatggcactctaaccgccctccggcggtttg

SEQ ID NO: 1674 - RNA, 126 nt, synthetic construct
  source 1..126: mol_type = other RNA
aaatatccaaaccgccgaaggttttagagctagaaatagcaagttaaaataaggctagtccgttatcaacttgaaaaagtggcaccgagtcggtgcgcggagacagttcttagatccggcggtttg

SEQ ID NO: 1675 - RNA, 121 nt, synthetic construct
  source 1..121: mol_type = other RNA
aaatatccaaaccgccgaaggttttagagctagaaatagcaagttaaaataaggctagtccgttatcaacttgaaaaagtggcaccgagtcggtgcgacgtcgttgtgtgccggcggtttg

SEQ ID NO: 1676 - RNA, 134 nt, synthetic construct
  source 1..134: mol_type = other RNA
aaatatccaaaccgccgaaggttttagagctagaaatagcaagttaaaataaggctagtccgttatcaacttgaaaaagtggcaccgagtcggtgcggatgtccattggaccgcgcttcggtgccggcggtttg

SEQ ID NO: 1677 - RNA, 134 nt, synthetic construct
  source 1..134: mol_type = other RNA
aaatatccaaaccgccgaaggttttagagctagaaatagcaagttaaaataaggctagtccgttatcaacttgaaaaagtggcaccgagtcggtgccggctacgtcccgggacgtgccccgtgccggcggtttg

SEQ ID NO: 1678 - RNA, 121 nt, synthetic construct
  source 1..121: mol_type = other RNA
aaatatccaaaccgccgaaggttttagagctagaaatagcaagttaaaataaggctagtccgttatcaacttgaaaaagtggcaccgagtcggtgctggggtaacgcgcgtcggcggtttg

SEQ ID NO: 1679 - RNA, 116 nt, synthetic construct
  source 1..116: mol_type = other RNA
aaatatccaaaccgccgaaggttttagagctagaaatagcaagttaaaataaggctagtccgttatcaacttgaaaaagtggcaccgagtcggtgcctagcactgccggcggtttg

SEQ ID NO: 1680 - RNA, 121 nt, synthetic construct
  source 1..121: mol_type = other RNA
aaatatccaaaccgccgaaggttttagagctagaaatagcaagttaaaataaggctagtccgttatcaacttgaaaaagtggcaccgagtcggtgccctgagcctcgtggccggcggtttg

SEQ ID NO: 1681 - RNA, 116 nt, synthetic construct
  source 1..116: mol_type = other RNA
aaatatccaaaccgccgaaggttttagagctagaaatagcaagttaaaataaggctagtccgttatcaacttgaaaaagtggcaccgagtcggtgcccgcgctggccggcggtttg

SEQ ID NO: 1682 - RNA, 136 nt, synthetic construct
  source 1..136: mol_type = other RNA
aaatatccaaaccgccgaaggttttagagctagaaatagcaagttaaaataaggctagtccgttatcaacttgaaaaagtggcaccgagtcggtgctgcaggaggccgtccgccggacgggtgggccggcggtttg

SEQ ID NO: 1683 - RNA, 126 nt, synthetic construct
  source 1..126: mol_type = other RNA
aaatatccaaaccgccgaaggttttagagctagaaatagcaagttaaaataaggctagtccgttatcaacttgaaaaagtggcaccgagtcggtgcccgcactcggcccgtggggccggcggtttg

SEQ ID NO: 1684 - RNA, 136 nt, synthetic construct
  source 1..136: mol_type = other RNA
aaatatccaaaccgccgaaggttttagagctagaaatagcaagttaaaataaggctagtccgttatcaacttgaaaaagtggcaccgagtcggtgcccggcgccacaggccgtgccgctgcggggccggcggtttg

SEQ ID NO: 1685 - RNA, 128 nt, synthetic construct
  source 1..128: mol_type = other RNA
aaatatccaaaccgccgaaggttttagagctagaaatagcaagttaaaataaggctagtccgttatcaacttgaaaaagtggcaccgagtcggtgcgcgagtgccagtcgcccggggccggcggtttg

SEQ ID NO: 1686 - RNA, 116 nt, synthetic construct
  source 1..116: mol_type = other RNA
aaatatccaaaccgccgaaggttttagagctagaaatagcaagttaaaataaggctagtccgttatcaacttgaaaaagtggcaccgagtcggtgcttgtaggggccggcggtttg

SEQ ID NO: 1687 - RNA, 134 nt, synthetic construct
  source 1..134: mol_type = other RNA
aaatatccaaaccgccgaaggttttagagctagaaatagcaagttaaaataaggctagtccgttatcaacttgaaaaagtggcaccgagtcggtgccgccccgggccggggaggctgagcgggccggcggtttg

SEQ ID NO: 1688 - RNA, 121 nt, synthetic construct
  source 1..121: mol_type = other RNA
aaatatccaaaccgccgaaggttttagagctagaaatagcaagttaaaataaggctagtccgttatcaacttgaaaaagtggcaccgagtcggtgccactacggacagggccggcggtttg

SEQ ID NO: 1689 - RNA, 134 nt, synthetic construct
  source 1..134: mol_type = other RNA
aaatatccaaaccgccgaaggttttagagctagaaatagcaagttaaaataaggctagtccgttatcaacttgaaaaagtggcaccgagtcggtgcccgggaggtggccgttgttgcgcgccgtcggcggtttg

SEQ ID NO: 1690 - RNA, 128 nt, synthetic construct
  source 1..128: mol_type = other RNA
aaatatccaaaccgccgaaggttttagagctagaaatagcaagttaaaataaggctagtccgttatcaacttgaaaaagtggcaccgagtcggtgcctcagagcagcactgagtcggccggcggtttg

SEQ ID NO: 1691 - RNA, 128 nt, synthetic construct
  source 1..128: mol_type = other RNA
aaatatccaaaccgccgaaggttttagagctagaaatagcaagttaaaataaggctagtccgttatcaacttgaaaaagtggcaccgagtcggtgcccgcgccgcggaggcgggcggccggcggtttg

SEQ ID NO: 1692 - RNA, 121 nt, synthetic construct
  source 1..121: mol_type = other RNA
aaatatccaaaccgccgaaggttttagagctagaaatagcaagttaaaataaggctagtccgttatcaacttgaaaaagtggcaccgagtcggtgccgaggccagggcggccggcggtttg

SEQ ID NO: 1693 - RNA, 136 nt, synthetic construct
  source 1..136: mol_type = other RNA
aaatatccaaaccgccgaaggttttagagctagaaatagcaagttaaaataaggctagtccgttatcaacttgaaaaagtggcaccgagtcggtgcggccgggcgtcgcggcccggtgcggccggccggcggtttg

SEQ ID NO: 1694 - RNA, 126 nt, synthetic construct
  source 1..126: mol_type = other RNA
aaatatccaaaccgccgaaggttttagagctagaaatagcaagttaaaataaggctagtccgttatcaacttgaaaaagtggcaccgagtcggtgctgagataacaaatgtcccgtcggcggtttg

SEQ ID NO: 1695 - RNA, 124 nt, synthetic construct
  source 1..124: mol_type = other RNA
aaatatccaaaccgccgaaggttttagagctagaaatagcaagttaaaataaggctagtccgttatcaacttgaaaaagtggcaccgagtcggtgcccgcgcggaggttacggccggcggtttg

SEQ ID NO: 1696 - RNA, 116 nt, synthetic construct
  source 1..116: mol_type = other RNA
aaatatccaaaccgccgaaggttttagagctagaaatagcaagttaaaataaggctagtccgttatcaacttgaaaaagtggcaccgagtcggtgccagcctaggccggcggtttg

SEQ ID NO: 1697 - RNA, 128 nt, synthetic construct
  source 1..128: mol_type = other RNA
aaatatccaaaccgccgaaggttttagagctagaaatagcaagttaaaataaggctagtccgttatcaacttgaaaaagtggcaccgagtcggtgctgacccgggccgcccgcgaggccggcggtttg

SEQ ID NO: 1698 - RNA, 126 nt, synthetic construct
  source 1..126: mol_type = other RNA
aaatatccaaaccgccgaaggttttagagctagaaatagcaagttaaaataaggctagtccgttatcaacttgaaaaagtggcaccgagtcggtgctcggtgaggcccggccaggccggcggtttg

SEQ ID NO: 1699 - RNA, 136 nt, synthetic construct
  source 1..136: mol_type = other RNA
aaatatccaaaccgccgaaggttttagagctagaaatagcaagttaaaataaggctagtccgttatcaacttgaaaaagtggcaccgagtcggtgcctggacgaggtcgtggcggtcgagtaaggccggcggtttg

SEQ ID NO: 1700 - RNA, 141 nt, synthetic construct
  source 1..141: mol_type = other RNA
aaatatccaaaccgccgaaggttttagagctagaaatagcaagttaaaataaggctagtccgttatcaacttgaaaaagtggcaccgagtcggtgcagtcctcagtaccccgagccgtgacgtcggttcgccggcggtttg

SEQ ID NO: 1701 - RNA, 134 nt, synthetic construct
  source 1..134: mol_type = other RNA
aaatatccaaaccgccgaaggttttagagctagaaatagcaagttaaaataaggctagtccgttatcaacttgaaaaagtggcaccgagtcggtgcggccggccctgcctccgctccggtgcgccggcggtttg

SEQ ID NO: 1702 - RNA, 141 nt, synthetic construct
  source 1..141: mol_type = other RNA
aaatatccaaaccgccgaaggttttagagctagaaatagcaagttaaaataaggctagtccgttatcaacttgaaaaagtggcaccgagtcggtgcgctctcttggcagcggcttccccacttctgggcgccggcggtttg

SEQ ID NO: 1703 - RNA, 146 nt, synthetic construct
  source 1..146: mol_type = other RNA
aaatatccaaaccgccgaaggttttagagctagaaatagcaagttaaaataaggctagtccgttatcaacttgaaaaagtggcaccgagtcggtgcccgcgcgggcacggccgggccgcgcctggcgcgccggcgccggcggtttg

SEQ ID NO: 1704 - RNA, 128 nt, synthetic construct
  source 1..128: mol_type = other RNA
aaatatccaaaccgccgaaggttttagagctagaaatagcaagttaaaataaggctagtccgttatcaacttgaaaaagtggcaccgagtcggtgcacgggcgcggccgcaacggcgccggcggtttg

SEQ ID NO: 1705 - RNA, 136 nt, synthetic construct
  source 1..136: mol_type = other RNA
aaatatccaaaccgccgaaggttttagagctagaaatagcaagttaaaataaggctagtccgttatcaacttgaaaaagtggcaccgagtcggtgcctatcatgcatggcgatcccaggttcgcgccggcggtttg

SEQ ID NO: 1706 - RNA, 124 nt, synthetic construct
  source 1..124: mol_type = other RNA
aaatatccaaaccgccgaaggttttagagctagaaatagcaagttaaaataaggctagtccgttatcaacttgaaaaagtggcaccgagtcggtgcgaggttcccacccgtagtcggcggtttg

SEQ ID NO: 1707 - RNA, 146 nt, synthetic construct
  source 1..146: mol_type = other RNA
aaatatccaaaccgccgaaggttttagagctagaaatagcaagttaaaataaggctagtccgttatcaacttgaaaaagtggcaccgagtcggtgccgccccagcccgcgccggcccgcgcccaatgcccgcgcgccggcggtttg

SEQ ID NO: 1708 - RNA, 128 nt, synthetic construct
  source 1..128: mol_type = other RNA
aaatatccaaaccgccgaaggttttagagctagaaatagcaagttaaaataaggctagtccgttatcaacttgaaaaagtggcaccgagtcggtgctggcggactcggtccgtatagtcggcggtttg

SEQ ID NO: 1709 - RNA, 124 nt, synthetic construct
  source 1..124: mol_type = other RNA
aaatatccaaaccgccgaaggttttagagctagaaatagcaagttaaaataaggctagtccgttatcaacttgaaaaagtggcaccgagtcggtgccagccccgggacggccgccggcggtttg

SEQ ID NO: 1710 - RNA, 146 nt, synthetic construct
  source 1..146: mol_type = other RNA
aaatatccaaaccgccgaaggttttagagctagaaatagcaagttaaaataaggctagtccgttatcaacttgaaaaagtggcaccgagtcggtgcccgcgaggctcgtcgcgctgccaaactcgccgggccccgccggcggtttg

SEQ ID NO: 1711 - RNA, 128 nt, synthetic construct
  source 1..128: mol_type = other RNA
aaatatccaaaccgccgaaggttttagagctagaaatagcaagttaaaataaggctagtccgttatcaacttgaaaaagtggcaccgagtcggtgcttgatgtcgtaggtgataccgccggcggtttg

SEQ ID NO: 1712 - RNA, 121 nt, synthetic construct
  source 1..121: mol_type = other RNA
aaatatccaaaccgccgaaggttttagagctagaaatagcaagttaaaataaggctagtccgttatcaacttgaaaaagtggcaccgagtcggtgcgcctccgcccaccgccggcggtttg

SEQ ID NO: 1713 - RNA, 131 nt, synthetic construct
  source 1..131: mol_type = other RNA
aaatatccaaaccgccgaaggttttagagctagaaatagcaagttaaaataaggctagtccgttatcaacttgaaaaagtggcaccgagtcggtgccgcgtccgctgccggcgggcgacgccggcggtttg

SEQ ID NO: 1714 - RNA, 124 nt, synthetic construct
  source 1..124: mol_type = other RNA
aaatatccaaaccgccgaaggttttagagctagaaatagcaagttaaaataaggctagtccgttatcaacttgaaaaagtggcaccgagtcggtgcgcagataatcgatagagtcggcggtttg

SEQ ID NO: 1715 - RNA, 128 nt, synthetic construct
  source 1..128: mol_type = other RNA
aaatatccaaaccgccgaaggttttagagctagaaatagcaagttaaaataaggctagtccgttatcaacttgaaaaagtggcaccgagtcggtgcattgctcaggcgaacccgtagccggcggtttg

SEQ ID NO: 1716 - RNA, 124 nt, synthetic construct
  source 1..124: mol_type = other RNA
aaatatccaaaccgccgaaggttttagagctagaaatagcaagttaaaataaggctagtccgttatcaacttgaaaaagtggcaccgagtcggtgcgggcggccactggggagccggcggtttg

SEQ ID NO: 1717 - RNA, 126 nt, synthetic construct
  source 1..126: mol_type = other RNA
aaatatccaaaccgccgaaggttttagagctagaaatagcaagttaaaataaggctagtccgttatcaacttgaaaaagtggcaccgagtcggtgccgcgccggccgtcgcccagccggcggtttg

SEQ ID NO: 1718 - RNA, 134 nt, synthetic construct
  source 1..134: mol_type = other RNA
aaatatccaaaccgccgaaggttttagagctagaaatagcaagttaaaataaggctagtccgttatcaacttgaaaaagtggcaccgagtcggtgcgacggcccgcgtgactgcgacccacagccggcggtttg

SEQ ID NO: 1719 - RNA, 121 nt, synthetic construct
  source 1..121: mol_type = other RNA
aaatatccaaaccgccgaaggttttagagctagaaatagcaagttaaaataaggctagtccgttatcaacttgaaaaagtggcaccgagtcggtgcgcggcaagaatgtcccggcggtttg

SEQ ID NO: 1720 - RNA, 128 nt, synthetic construct
  source 1..128: mol_type = other RNA
aaatatccaaaccgccgaaggttttagagctagaaatagcaagttaaaataaggctagtccgttatcaacttgaaaaagtggcaccgagtcggtgcatctcgccacggacactggtcccggcggtttg

SEQ ID NO: 1721 - RNA, 124 nt, synthetic construct
  source 1..124: mol_type = other RNA
aaatatccaaaccgccgaaggttttagagctagaaatagcaagttaaaataaggctagtccgttatcaacttgaaaaagtggcaccgagtcggtgctacccggcgtccgcgtcccggcggtttg

SEQ ID NO: 1722 - RNA, 134 nt, synthetic construct
  source 1..134: mol_type = other RNA
aaatatccaaaccgccgaaggttttagagctagaaatagcaagttaaaataaggctagtccgttatcaacttgaaaaagtggcaccgagtcggtgcctcccctcgtatcgagcgtgatctctcccggcggtttg

SEQ ID NO: 1723 - RNA, 141 nt, synthetic construct
  source 1..141: mol_type = other RNA
aaatatccaaaccgccgaaggttttagagctagaaatagcaagttaaaataaggctagtccgttatcaacttgaaaaagtggcaccgagtcggtgcgcatcggacgctgcgacggcgccggccccggcagtcggcggtttg

SEQ ID NO: 1724 - RNA, 136 nt, synthetic construct
  source 1..136: mol_type = other RNA
aaatatccaaaccgccgaaggttttagagctagaaatagcaagttaaaataaggctagtccgttatcaacttgaaaaagtggcaccgagtcggtgcaccccacgtatcagcaaagtgcaaccctttcggcggtttg

SEQ ID NO: 1725 - RNA, 144 nt, synthetic construct
  source 1..144: mol_type = other RNA
aaatatccaaaccgccgaaggttttagagctagaaatagcaagttaaaataaggctagtccgttatcaacttgaaaaagtggcaccgagtcggtgctgcatgatggtccgatgctgcctgcctcggcctcatcccggcggtttg

SEQ ID NO: 1726 - RNA, 141 nt, synthetic construct
  source 1..141: mol_type = other RNA
aaatatccaaaccgccgaaggttttagagctagaaatagcaagttaaaataaggctagtccgttatcaacttgaaaaagtggcaccgagtcggtgctgatttgtgacgggtaaacagataattagccatcccggcggtttg

SEQ ID NO: 1727 - RNA, 131 nt, synthetic construct
  source 1..131: mol_type = other RNA
aaatatccaaaccgccgaaggttttagagctagaaatagcaagttaaaataaggctagtccgttatcaacttgaaaaagtggcaccgagtcggtgcgccgccccggggacgtcccgttgcccggcggtttg

SEQ ID NO: 1728 - RNA, 121 nt, synthetic construct
  source 1..121: mol_type = other RNA
aaatatccaaaccgccgaaggttttagagctagaaatagcaagttaaaataaggctagtccgttatcaacttgaaaaagtggcaccgagtcggtgcgtatggttaattgcccggcggtttg

SEQ ID NO: 1729 - RNA, 136 nt, synthetic construct
  source 1..136: mol_type = other RNA
aaatatccaaaccgccgaaggttttagagctagaaatagcaagttaaaataaggctagtccgttatcaacttgaaaaagtggcaccgagtcggtgcggcgccggcctgggagcccgggcctgggcccggcggtttg

SEQ ID NO: 1730 - RNA, 131 nt, synthetic construct
  source 1..131: mol_type = other RNA
aaatatccaaaccgccgaaggttttagagctagaaatagcaagttaaaataaggctagtccgttatcaacttgaaaaagtggcaccgagtcggtgccactgcaccgcttcggtctgcggcccggcggtttg

SEQ ID NO: 1731 - RNA, 126 nt, synthetic construct
  source 1..126: mol_type = other RNA
aaatatccaaaccgccgaaggttttagagctagaaatagcaagttaaaataaggctagtccgttatcaacttgaaaaagtggcaccgagtcggtgcccccgccgccccgtccggcccggcggtttg

SEQ ID NO: 1732 - RNA, 124 nt, synthetic construct
  source 1..124: mol_type = other RNA
aaatatccaaaccgccgaaggttttagagctagaaatagcaagttaaaataaggctagtccgttatcaacttgaaaaagtggcaccgagtcggtgcaggcctggcgtccaggcccggcggtttg

SEQ ID NO: 1733 - RNA, 126 nt, synthetic construct
  source 1..126: mol_type = other RNA
aaatatccaaaccgccgaaggttttagagctagaaatagcaagttaaaataaggctagtccgttatcaacttgaaaaagtggcaccgagtcggtgcctcgtcactggatgtgaagtcggcggtttg

SEQ ID NO: 1734 - RNA, 134 nt, synthetic construct
  source 1..134: mol_type = other RNA
aaatatccaaaccgccgaaggttttagagctagaaatagcaagttaaaataaggctagtccgttatcaacttgaaaaagtggcaccgagtcggtgctgctgcccgccgcccgtagccacaggcccggcggtttg

SEQ ID NO: 1735 - RNA, 131 nt, synthetic construct
  source 1..131: mol_type = other RNA
aaatatccaaaccgccgaaggttttagagctagaaatagcaagttaaaataaggctagtccgttatcaacttgaaaaagtggcaccgagtcggtgccccggggccttggggctgcctcgcccggcggtttg

SEQ ID NO: 1736 - RNA, 128 nt, synthetic construct
  source 1..128: mol_type = other RNA
aaatatccaaaccgccgaaggttttagagctagaaatagcaagttaaaataaggctagtccgttatcaacttgaaaaagtggcaccgagtcggtgcccgatcccggcccgcccgcgcccggcggtttg

SEQ ID NO: 1737 - RNA, 141 nt, synthetic construct
  source 1..141: mol_type = other RNA
aaatatccaaaccgccgaaggttttagagctagaaatagcaagttaaaataaggctagtccgttatcaacttgaaaaagtggcaccgagtcggtgccgccaccgggttctccggtacctgcggcttggccccggcggtttg

SEQ ID NO: 1738 - RNA, 126 nt, synthetic construct
  source 1..126: mol_type = other RNA
aaatatccaaaccgccgaaggttttagagctagaaatagcaagttaaaataaggctagtccgttatcaacttgaaaaagtggcaccgagtcggtgccacggccgggccgccgctctcggcggtttg

SEQ ID NO: 1739 - RNA, 116 nt, synthetic construct
  source 1..116: mol_type = other RNA
aaatatccaaaccgccgaaggttttagagctagaaatagcaagttaaaataaggctagtccgttatcaacttgaaaaagtggcaccgagtcggtgcagctaggccccggcggtttg

SEQ ID NO: 1740 - RNA, 126 nt, synthetic construct
  source 1..126: mol_type = other RNA
aaatatccaaaccgccgaaggttttagagctagaaatagcaagttaaaataaggctagtccgttatcaacttgaaaaagtggcaccgagtcggtgccgtcgatgggtccgacgccccggcggtttg

SEQ ID NO: 1741 - RNA, 128 nt, synthetic construct
  source 1..128: mol_type = other RNA
aaatatccaaaccgccgaaggttttagagctagaaatagcaagttaaaataaggctagtccgttatcaacttgaaaaagtggcaccgagtcggtgcccggcccctgaggccgggcccccggcggtttg

SEQ ID NO: 1742 - RNA, 134 nt, synthetic construct
  source 1..134: mol_type = other RNA
aaatatccaaaccgccgaaggttttagagctagaaatagcaagttaaaataaggctagtccgttatcaacttgaaaaagtggcaccgagtcggtgccgcgggagccggccgccggcgccgcccccggcggtttg

SEQ ID NO: 1743 - RNA, 129 nt, synthetic construct
  source 1..129: mol_type = other RNA
aaatatccaaaccgccgaaggttttagagctagaaatagcaagttaaaataaggctagtccgttatcaacttgaaaaagtggcaccgagtcggtgctcgtggtctcgggcatcagaccccggcggtttg

SEQ ID NO: 1744 - RNA, 136 nt, synthetic construct
  source 1..136: mol_type = other RNA
aaatatccaaaccgccgaaggttttagagctagaaatagcaagttaaaataaggctagtccgttatcaacttgaaaaagtggcaccgagtcggtgcgtgtctcatgtttccttgtattacgttacccggcggtttg

SEQ ID NO: 1745 - RNA, 136 nt, synthetic construct
  source 1..136: mol_type = other RNA
aaatatccaaaccgccgaaggttttagagctagaaatagcaagttaaaataaggctagtccgttatcaacttgaaaaagtggcaccgagtcggtgcagtgtttaccttatctgcttacgtagtacccggcggtttg

SEQ ID NO: 1746 - RNA, 141 nt, synthetic construct
  source 1..141: mol_type = other RNA
aaatatccaaaccgccgaaggttttagagctagaaatagcaagttaaaataaggctagtccgttatcaacttgaaaaagtggcaccgagtcggtgcgatatgatactgaacgcccctagtgccaatggacccggcggtttg

SEQ ID NO: 1747 - RNA, 146 nt, synthetic construct
  source 1..146: mol_type = other RNA
aaatatccaaaccgccgaaggttttagagctagaaatagcaagttaaaataaggctagtccgttatcaacttgaaaaagtggcaccgagtcggtgcgcggccttaagttcgctctcaccccgtcgtcaccaggacccggcggtttg

SEQ ID NO: 1748 - RNA, 141 nt, synthetic construct
  source 1..141: mol_type = other RNA
aaatatccaaaccgccgaaggttttagagctagaaatagcaagttaaaataaggctagtccgttatcaacttgaaaaagtggcaccgagtcggtgcccggggaacggcttccccggcggcccggctcgtaccggcggtttg

SEQ ID NO: 1749 - RNA, 116 nt, synthetic construct
  source 1..116: mol_type = other RNA
aaatatccaaaccgccgaaggttttagagctagaaatagcaagttaaaataaggctagtccgttatcaacttgaaaaagtggcaccgagtcggtgcgaagccgtaccggcggtttg

SEQ ID NO: 1750 - RNA, 126 nt, synthetic construct
  source 1..126: mol_type = other RNA
aaatatccaaaccgccgaaggttttagagctagaaatagcaagttaaaataaggctagtccgttatcaacttgaaaaagtggcaccgagtcggtgctatatgcattaccccgataccggcggtttg

SEQ ID NO: 1751 - RNA, 121 nt, synthetic construct
  source 1..121: mol_type = other RNA
aaatatccaaaccgccgaaggttttagagctagaaatagcaagttaaaataaggctagtccgttatcaacttgaaaaagtggcaccgagtcggtgcaggcgcgtaggtgaccggcggtttg

SEQ ID NO: 1752 - RNA, 131 nt, synthetic construct
  source 1..131: mol_type = other RNA
aaatatccaaaccgccgaaggttttagagctagaaatagcaagttaaaataaggctagtccgttatcaacttgaaaaagtggcaccgagtcggtgcggaggctcgcaccgaaatcagcgaccggcggtttg

SEQ ID NO: 1753 - RNA, 141 nt, synthetic construct
  source 1..141: mol_type = other RNA
aaatatccaaaccgccgaaggttttagagctagaaatagcaagttaaaataaggctagtccgttatcaacttgaaaaagtggcaccgagtcggtgctcggcgccccgggcgtggccggcgtgcaggccgaccggcggtttg

SEQ ID NO: 1754 - RNA, 134 nt, synthetic construct
  source 1..134: mol_type = other RNA
aaatatccaaaccgccgaaggttttagagctagaaatagcaagttaaaataaggctagtccgttatcaacttgaaaaagtggcaccgagtcggtgccccgtgccctcggtcacgccgacttcaccggcggtttg

SEQ ID NO: 1755 - RNA, 136 nt, synthetic construct
  source 1..136: mol_type = other RNA
aaatatccaaaccgccgaaggttttagagctagaaatagcaagttaaaataaggctagtccgttatcaacttgaaaaagtggcaccgagtcggtgccgggaggctggggcgcggggcccggcgcaccggcggtttg

SEQ ID NO: 1756 - RNA, 131 nt, synthetic construct
  source 1..131: mol_type = other RNA
aaatatccaaaccgccgaaggttttagagctagaaatagcaagttaaaataaggctagtccgttatcaacttgaaaaagtggcaccgagtcggtgcgggccgtgggagcctccgtcaccaccggcggtttg

SEQ ID NO: 1757 - RNA, 121 nt, synthetic construct
  source 1..121: mol_type = other RNA
aaatatccaaaccgccgaaggttttagagctagaaatagcaagttaaaataaggctagtccgttatcaacttgaaaaagtggcaccgagtcggtgcagctacttgtgtaaccggcggtttg

SEQ ID NO: 1758 - RNA, 128 nt, synthetic construct
  source 1..128: mol_type = other RNA
aaatatccaaaccgccgaaggttttagagctagaaatagcaagttaaaataaggctagtccgttatcaacttgaaaaagtggcaccgagtcggtgccccgtaacgcccacccgcgaaccggcggtttg

SEQ ID NO: 1759 - RNA, 128 nt, synthetic construct
  source 1..128: mol_type = other RNA
aaatatccaaaccgccgaaggttttagagctagaaatagcaagttaaaataaggctagtccgttatcaacttgaaaaagtggcaccgagtcggtgcatgagtccaggccatgtgaaaccggcggtttg

SEQ ID NO: 1760 - RNA, 136 nt, synthetic construct
  source 1..136: mol_type = other RNA
aaatatccaaaccgccgaaggttttagagctagaaatagcaagttaaaataaggctagtccgttatcaacttgaaaaagtggcaccgagtcggtgcgatttgataatctcgtatatagagcagttacggcggtttg

SEQ ID NO: 1761 - RNA, 124 nt, synthetic construct
  source 1..124: mol_type = other RNA
aaatatccaaaccgccgaaggttttagagctagaaatagcaagttaaaataaggctagtccgttatcaacttgaaaaagtggcaccgagtcggtgcaaagtctcatttgacttacggcggtttg

SEQ ID NO: 1762 - RNA, 124 nt, synthetic construct
  source 1..124: mol_type = other RNA
aaatatccaaaccgccgaaggttttagagctagaaatagcaagttaaaataaggctagtccgttatcaacttgaaaaagtggcaccgagtcggtgccgccggagcggccgggtacggcggtttg

SEQ ID NO: 1763 - RNA, 146 nt, synthetic construct
  source 1..146: mol_type = other RNA
aaatatccaaaccgccgaaggttttagagctagaaatagcaagttaaaataaggctagtccgttatcaacttgaaaaagtggcaccgagtcggtgcttccatagctaacgtatttggtaattacattcaagaagtacggcggtttg

SEQ ID NO: 1764 - RNA, 141 nt, synthetic construct
  source 1..141: mol_type = other RNA
aaatatccaaaccgccgaaggttttagagctagaaatagcaagttaaaataaggctagtccgttatcaacttgaaaaagtggcaccgagtcggtgcagcttgagatgacagtgatctcggaaattgatctacggcggtttg

SEQ ID NO: 1765 - RNA, 134 nt, synthetic construct
  source 1..134: mol_type = other RNA
aaatatccaaaccgccgaaggttttagagctagaaatagcaagttaaaataaggctagtccgttatcaacttgaaaaagtggcaccgagtcggtgcctagaatgacttatgcgatagagtgctacggcggtttg

SEQ ID NO: 1766 - RNA, 134 nt, synthetic construct
  source 1..134: mol_type = other RNA
aaatatccaaaccgccgaaggttttagagctagaaatagcaagttaaaataaggctagtccgttatcaacttgaaaaagtggcaccgagtcggtgccgcccaggtccaataggtgaaatatgctcggcggtttg

SEQ ID NO: 1767 - RNA, 128 nt, synthetic construct
  source 1..128: mol_type = other RNA
aaatatccaaaccgccgaaggttttagagctagaaatagcaagttaaaataaggctagtccgttatcaacttgaaaaagtggcaccgagtcggtgctgtgcaacttcattgttagatacggcggtttg

SEQ ID NO: 1768 - RNA, 141 nt, synthetic construct
  source 1..141: mol_type = other RNA
aaatatccaaaccgccgaaggttttagagctagaaatagcaagttaaaataaggctagtccgttatcaacttgaaaaagtggcaccgagtcggtgcgataatctttaacaacgtgaagaattcatgtttgacggcggtttg

SEQ ID NO: 1769 - RNA, 136 nt, synthetic construct
  source 1..136: mol_type = other RNA
aaatatccaaaccgccgaaggttttagagctagaaatagcaagttaaaataaggctagtccgttatcaacttgaaaaagtggcaccgagtcggtgcggattccggtacccgcggggtggccttggacggcggtttg

SEQ ID NO: 1770 - RNA, 141 nt, synthetic construct
  source 1..141: mol_type = other RNA
aaatatccaaaccgccgaaggttttagagctagaaatagcaagttaaaataaggctagtccgttatcaacttgaaaaagtggcaccgagtcggtgccgttctggcgagccgcgcggcgtgccgggaggggacggcggtttg

SEQ ID NO: 1771 - RNA, 146 nt, synthetic construct
  source 1..146: mol_type = other RNA
aaatatccaaaccgccgaaggttttagagctagaaatagcaagttaaaataaggctagtccgttatcaacttgaaaaagtggcaccgagtcggtgcgcacatgtccacgccagcagcgccaggtggcggacagggacggcggtttg

SEQ ID NO: 1772 - RNA, 128 nt, synthetic construct
  source 1..128: mol_type = other RNA
aaatatccaaaccgccgaaggttttagagctagaaatagcaagttaaaataaggctagtccgttatcaacttgaaaaagtggcaccgagtcggtgccgtgggtcgtccgctgttaggacggcggtttg

SEQ ID NO: 1773 - RNA, 136 nt, synthetic construct
  source 1..136: mol_type = other RNA
aaatatccaaaccgccgaaggttttagagctagaaatagcaagttaaaataaggctagtccgttatcaacttgaaaaagtggcaccgagtcggtgcccggctcgcaggctgggccgataccgtcgacggcggtttg

SEQ ID NO: 1774 - RNA, 126 nt, synthetic construct
  source 1..126: mol_type = other RNA
aaatatccaaaccgccgaaggttttagagctagaaatagcaagttaaaataaggctagtccgttatcaacttgaaaaagtggcaccgagtcggtgcccgaggtctagggtgtccgacggcggtttg

SEQ ID NO: 1775 - RNA, 124 nt, synthetic construct
  source 1..124: mol_type = other RNA
aaatatccaaaccgccgaaggttttagagctagaaatagcaagttaaaataaggctagtccgttatcaacttgaaaaagtggcaccgagtcggtgcgcgtgtaacgcgcgggctcggcggtttg

SEQ ID NO: 1776 - RNA, 124 nt, synthetic construct
  source 1..124: mol_type = other RNA
aaatatccaaaccgccgaaggttttagagctagaaatagcaagttaaaataaggctagtccgttatcaacttgaaaaagtggcaccgagtcggtgcaggcggaagaccggccgacggcggtttg

SEQ ID NO: 1777 - RNA, 131 nt, synthetic construct
  source 1..131: mol_type = other RNA
aaatatccaaaccgccgaaggttttagagctagaaatagcaagttaaaataaggctagtccgttatcaacttgaaaaagtggcaccgagtcggtgccccggcgcctgagcccggccgccgacggcggtttg

SEQ ID NO: 1778 - RNA, 121 nt, synthetic construct
  source 1..121: mol_type = other RNA
aaatatccaaaccgccgaaggttttagagctagaaatagcaagttaaaataaggctagtccgttatcaacttgaaaaagtggcaccgagtcggtgcgcggattgaacacgacggcggtttg

SEQ ID NO: 1779 - RNA, 134 nt, synthetic construct
  source 1..134: mol_type = other RNA
aaatatccaaaccgccgaaggttttagagctagaaatagcaagttaaaataaggctagtccgttatcaacttgaaaaagtggcaccgagtcggtgctatagtgtgttgattccatcgttgcagacggcggtttg

SEQ ID NO: 1780 - RNA, 124 nt, synthetic construct
  source 1..124: mol_type = other RNA
aaatatccaaaccgccgaaggttttagagctagaaatagcaagttaaaataaggctagtccgttatcaacttgaaaaagtggcaccgagtcggtgcacccaagaggagggcagacggcggtttg

SEQ ID NO: 1781 - RNA, 131 nt, synthetic construct
  source 1..131: mol_type = other RNA
aaatatccaaaccgccgaaggttttagagctagaaatagcaagttaaaataaggctagtccgttatcaacttgaaaaagtggcaccgagtcggtgcaagctcctcaattccattcacaagacggcggtttg

SEQ ID NO: 1782 - RNA, 128 nt, synthetic construct
  source 1..128: mol_type = other RNA
aaatatccaaaccgccgaaggttttagagctagaaatagcaagttaaaataaggctagtccgttatcaacttgaaaaagtggcaccgagtcggtgcccaccgcggcccggggcaggctcggcggtttg

SEQ ID NO: 1783 - RNA, 131 nt, synthetic construct
  source 1..131: mol_type = other RNA
aaatatccaaaccgccgaaggttttagagctagaaatagcaagttaaaataaggctagtccgttatcaacttgaaaaagtggcaccgagtcggtgcgaaagtaattacaccttacctatcacggcggtttg

SEQ ID NO: 1784 - RNA, 126 nt, synthetic construct
  source 1..126: mol_type = other RNA
aaatatccaaaccgccgaaggttttagagctagaaatagcaagttaaaataaggctagtccgttatcaacttgaaaaagtggcaccgagtcggtgcgcctgagattcgaagccgctcggcggtttg

SEQ ID NO: 1785 - RNA, 121 nt, synthetic construct
  source 1..121: mol_type = other RNA
aaatatccaaaccgccgaaggttttagagctagaaatagcaagttaaaataaggctagtccgttatcaacttgaaaaagtggcaccgagtcggtgctcggccccgcgtgcacggcggtttg

SEQ ID NO: 1786 - RNA, 131 nt, synthetic construct
  source 1..131: mol_type = other RNA
aaatatccaaaccgccgaaggttttagagctagaaatagcaagttaaaataaggctagtccgttatcaacttgaaaaagtggcaccgagtcggtgccgtagggcttcagtgtacccgtgcacggcggtttg

SEQ ID NO: 1787 - RNA, 121 nt, synthetic construct
  source 1..121: mol_type = other RNA
aaatatccaaaccgccgaaggttttagagctagaaatagcaagttaaaataaggctagtccgttatcaacttgaaaaagtggcaccgagtcggtgcagccgccgtgcggcacggcggtttg

SEQ ID NO: 1788 - RNA, 126 nt, synthetic construct
  source 1..126: mol_type = other RNA
aaatatccaaaccgccgaaggttttagagctagaaatagcaagttaaaataaggctagtccgttatcaacttgaaaaagtggcaccgagtcggtgccctatacacggccgcccgcacggcggtttg

SEQ ID NO: 1789 - RNA, 121 nt, synthetic construct
  source 1..121: mol_type = other RNA
aaatatccaaaccgccgaaggttttagagctagaaatagcaagttaaaataaggctagtccgttatcaacttgaaaaagtggcaccgagtcggtgccctcggtgacccgcacggcggtttg

SEQ ID NO: 1790 - RNA, 116 nt, synthetic construct
  source 1..116: mol_type = other RNA
aaatatccaaaccgccgaaggttttagagctagaaatagcaagttaaaataaggctagtccgttatcaacttgaaaaagtggcaccgagtcggtgcggtccccgctcggcggtttg

SEQ ID NO: 1791 - RNA, 131 nt, synthetic construct
  source 1..131: mol_type = other RNA
aaatatccaaaccgccgaaggttttagagctagaaatagcaagttaaaataaggctagtccgttatcaacttgaaaaagtggcaccgagtcggtgcgtgtggagctatctaggaatacgcacggcggtttg

SEQ ID NO: 1792 - RNA, 128 nt, synthetic construct
  source 1..128: mol_type = other RNA
aaatatccaaaccgccgaaggttttagagctagaaatagcaagttaaaataaggctagtccgttatcaacttgaaaaagtggcaccgagtcggtgcgccccacgccacggcatttccacggcggtttg

SEQ ID NO: 1793 - RNA, 136 nt, synthetic construct
  source 1..136: mol_type = other RNA
aaatatccaaaccgccgaaggttttagagctagaaatagcaagttaaaataaggctagtccgttatcaacttgaaaaagtggcaccgagtcggtgcgcgagctagggccaagcctgtggcggtccacggcggtttg

SEQ ID NO: 1794 - RNA, 124 nt, synthetic construct
  source 1..124: mol_type = other RNA
aaatatccaaaccgccgaaggttttagagctagaaatagcaagttaaaataaggctagtccgttatcaacttgaaaaagtggcaccgagtcggtgcgacgacataagtaccccacggcggtttg

SEQ ID NO: 1795 - RNA, 126 nt, synthetic construct
  source 1..126: mol_type = other RNA
aaatatccaaaccgccgaaggttttagagctagaaatagcaagttaaaataaggctagtccgttatcaacttgaaaaagtggcaccgagtcggtgccccggaatccggccgtaccacggcggtttg

SEQ ID NO: 1796 - RNA, 131 nt, synthetic construct
  source 1..131: mol_type = other RNA
aaatatccaaaccgccgaaggttttagagctagaaatagcaagttaaaataaggctagtccgttatcaacttgaaaaagtggcaccgagtcggtgcccgaggccgaaaccggaaactaccacggcggtttg

SEQ ID NO: 1797 - RNA, 116 nt, synthetic construct
  source 1..116: mol_type = other RNA
aaatatccaaaccgccgaaggttttagagctagaaatagcaagttaaaataaggctagtccgttatcaacttgaaaaagtggcaccgagtcggtgcccggcggacacggcggtttg

SEQ ID NO: 1798 - RNA, 126 nt, synthetic construct
  source 1..126: mol_type = other RNA
aaatatccaaaccgccgaaggttttagagctagaaatagcaagttaaaataaggctagtccgttatcaacttgaaaaagtggcaccgagtcggtgcgtgccggagcgcgggccacacggcggtttg

SEQ ID NO: 1799 - RNA, 141 nt, synthetic construct
  source 1..141: mol_type = other RNA
aaatatccaaaccgccgaaggttttagagctagaaatagcaagttaaaataaggctagtccgttatcaacttgaaaaagtggcaccgagtcggtgcacgtgcgcgctcaatactcaatgtaacgtcccacacggcggtttg

SEQ ID NO: 1800 - RNA, 141 nt, synthetic construct
  source 1..141: mol_type = other RNA
aaatatccaaaccgccgaaggttttagagctagaaatagcaagttaaaataaggctagtccgttatcaacttgaaaaagtggcaccgagtcggtgctggtgacagcaccaggtcatggcgttaagtcaacacggcggtttg

SEQ ID NO: 1801 - RNA, 131 nt, synthetic construct
  source 1..131: mol_type = other RNA
aaatatccaaaccgccgaaggttttagagctagaaatagcaagttaaaataaggctagtccgttatcaacttgaaaaagtggcaccgagtcggtgcccttaagcgttattgtcccctttaacggcggtttg

SEQ ID NO: 1802 - RNA, 134 nt, synthetic construct
  source 1..134: mol_type = other RNA
aaatatccaaaccgccgaaggttttagagctagaaatagcaagttaaaataaggctagtccgttatcaacttgaaaaagtggcaccgagtcggtgcctaagatgtagcccttggtaataggtaacggcggtttg

SEQ ID NO: 1803 - RNA, 144 nt, synthetic construct
  source 1..144: mol_type = other RNA
aaatatccaaaccgccgaaggttttagagctagaaatagcaagttaaaataaggctagtccgttatcaacttgaaaaagtggcaccgagtcggtgcttgccgcacgccgagccttctctacgggcccgggcgaacggcggtttg

SEQ ID NO: 1804 - RNA, 124 nt, synthetic construct
  source 1..124: mol_type = other RNA
aaatatccaaaccgccgaaggttttagagctagaaatagcaagttaaaataaggctagtccgttatcaacttgaaaaagtggcaccgagtcggtgctcagaaaccggcgtagaacggcggtttg

SEQ ID NO: 1805 - RNA, 141 nt, synthetic construct
  source 1..141: mol_type = other RNA
aaatatccaaaccgccgaaggttttagagctagaaatagcaagttaaaataaggctagtccgttatcaacttgaaaaagtggcaccgagtcggtgctatcagcggtacccttaacaaagtctctttgagaacggcggtttg

SEQ ID NO: 1806 - RNA, 131 nt, synthetic construct
  source 1..131: mol_type = other RNA
aaatatccaaaccgccgaaggttttagagctagaaatagcaagttaaaataaggctagtccgttatcaacttgaaaaagtggcaccgagtcggtgccgggccgcacccgacaccaccgcaacggcggtttg

SEQ ID NO: 1807 - RNA, 124 nt, synthetic construct
  source 1..124: mol_type = other RNA
aaatatccaaaccgccgaaggttttagagctagaaatagcaagttaaaataaggctagtccgttatcaacttgaaaaagtggcaccgagtcggtgcgtacatggcagagagcaacggcggtttg

SEQ ID NO: 1808 - RNA, 128 nt, synthetic construct
  source 1..128: mol_type = other RNA
aaatatccaaaccgccgaaggttttagagctagaaatagcaagttaaaataaggctagtccgttatcaacttgaaaaagtggcaccgagtcggtgctcatacacagagcaaactccaacggcggtttg

SEQ ID NO: 1809 - RNA, 126 nt, synthetic construct
  source 1..126: mol_type = other RNA
aaatatccaaaccgccgaaggttttagagctagaaatagcaagttaaaataaggctagtccgttatcaacttgaaaaagtggcaccgagtcggtgcacagcaccatctagtgtaaacggcggtttg

SEQ ID NO: 1810 - RNA, 134 nt, synthetic construct
  source 1..134: mol_type = other RNA
aaatatccaaaccgccgaaggttttagagctagaaatagcaagttaaaataaggctagtccgttatcaacttgaaaaagtggcaccgagtcggtgcccgcccgtcgtggaggcgggctgcagctcggcggtttg

SEQ ID NO: 1811 - RNA, 128 nt, synthetic construct
  source 1..128: mol_type = other RNA
aaatatccaaaccgccgaaggttttagagctagaaatagcaagttaaaataaggctagtccgttatcaacttgaaaaagtggcaccgagtcggtgctgcccgatctgcgcgccggaaacggcggtttg

SEQ ID NO: 1812 - RNA, 128 nt, synthetic construct
  source 1..128: mol_type = other RNA
aaatatccaaaccgccgaaggttttagagctagaaatagcaagttaaaataaggctagtccgttatcaacttgaaaaagtggcaccgagtcggtgctcttctagcacttgatgttcctcggcggtttg

SEQ ID NO: 1813 - RNA, 121 nt, synthetic construct
  source 1..121: mol_type = other RNA
aaatatccaaaccgccgaaggttttagagctagaaatagcaagttaaaataaggctagtccgttatcaacttgaaaaagtggcaccgagtcggtgccaaatcgatgatcctcggcggtttg

SEQ ID NO: 1814 - RNA, 136 nt, synthetic construct
  source 1..136: mol_type = other RNA
aaatatccaaaccgccgaaggttttagagctagaaatagcaagttaaaataaggctagtccgttatcaacttgaaaaagtggcaccgagtcggtgcccatatcaatcggggcccaggcggtgtcttcggcggtttg

SEQ ID NO: 1815 - RNA, 128 nt, synthetic construct
  source 1..128: mol_type = other RNA
aaatatccaaaccgccgaaggttttagagctagaaatagcaagttaaaataaggctagtccgttatcaacttgaaaaagtggcaccgagtcggtgcgggtcgttattctacccatcctcggcggtttg

SEQ ID NO: 1816 - RNA, 128 nt, synthetic construct
  source 1..128: mol_type = other RNA
aaatatccaaaccgccgaaggttttagagctagaaatagcaagttaaaataaggctagtccgttatcaacttgaaaaagtggcaccgagtcggtgcttatgatgtgcgtggtatgactcggcggtttg

SEQ ID NO: 1817 - RNA, 134 nt, synthetic construct
  source 1..134: mol_type = other RNA
aaatatccaaaccgccgaaggttttagagctagaaatagcaagttaaaataaggctagtccgttatcaacttgaaaaagtggcaccgagtcggtgctcggcggacggaccgctgcgcagggcttcggcggtttg

SEQ ID NO: 1818 - RNA, 131 nt, synthetic construct
  source 1..131: mol_type = other RNA
aaatatccaaaccgccgaaggttttagagctagaaatagcaagttaaaataaggctagtccgttatcaacttgaaaaagtggcaccgagtcggtgcaaggaaagagagcccgcctctctcccggcggtttg

SEQ ID NO: 1819 - RNA, 121 nt, synthetic construct
  source 1..121: mol_type = other RNA
aaatatccaaaccgccgaaggttttagagctagaaatagcaagttaaaataaggctagtccgttatcaacttgaaaaagtggcaccgagtcggtgcaagggcggtggcccgcggcggtttg

SEQ ID NO: 1820 - RNA, 131 nt, synthetic construct
  source 1..131: mol_type = other RNA
aaatatccaaaccgccgaaggttttagagctagaaatagcaagttaaaataaggctagtccgttatcaacttgaaaaagtggcaccgagtcggtgcaaggtaaggtgcacaaacaccttgccggcggtttg

SEQ ID NO: 1821 - RNA, 136 nt, synthetic construct
  source 1..136: mol_type = other RNA
aaatatccaaaccgccgaaggttttagagctagaaatagcaagttaaaataaggctagtccgttatcaacttgaaaaagtggcaccgagtcggtgcacatggagaacagaatatctcttgtgcagacggcggtttg

SEQ ID NO: 1822 - RNA, 131 nt, synthetic construct
  source 1..131: mol_type = other RNA
aaatatccaaaccgccgaaggttttagagctagaaatagcaagttaaaataaggctagtccgttatcaacttgaaaaagtggcaccgagtcggtgcaccacgacctatatgtgatcctttacggcggtttg

SEQ ID NO: 1823 - RNA, 126 nt, synthetic construct
  source 1..126: mol_type = other RNA
aaatatccaaaccgccgaaggttttagagctagaaatagcaagttaaaataaggctagtccgttatcaacttgaaaaagtggcaccgagtcggtgcaccagccggcttccgccggccggcggtttg

SEQ ID NO: 1824 - RNA, 136 nt, synthetic construct
  source 1..136: mol_type = other RNA
aaatatccaaaccgccgaaggttttagagctagaaatagcaagttaaaataaggctagtccgttatcaacttgaaaaagtggcaccgagtcggtgcacccgtgggagtgtcgagcacttggatcaccggcggtttg

SEQ ID NO: 1825 - RNA, 131 nt, synthetic construct
  source 1..131: mol_type = other RNA
aaatatccaaaccgccgaaggttttagagctagaaatagcaagttaaaataaggctagtccgttatcaacttgaaaaagtggcaccgagtcggtgcacgaggcggcccttgcgccgcaccccggcggtttg

SEQ ID NO: 1826 - RNA, 121 nt, synthetic construct
  source 1..121: mol_type = other RNA
aaatatccaaaccgccgaaggttttagagctagaaatagcaagttaaaataaggctagtccgttatcaacttgaaaaagtggcaccgagtcggtgcacgccgatagggcaacggcggtttg

SEQ ID NO: 1827 - RNA, 121 nt, synthetic construct
  source 1..121: mol_type = other RNA
aaatatccaaaccgccgaaggttttagagctagaaatagcaagttaaaataaggctagtccgttatcaacttgaaaaagtggcaccgagtcggtgcaggaccctcggtcgtcggcggtttg

SEQ ID NO: 1828 - RNA, 126 nt, synthetic construct
  source 1..126: mol_type = other RNA
aaatatccaaaccgccgaaggttttagagctagaaatagcaagttaaaataaggctagtccgttatcaacttgaaaaagtggcaccgagtcggtgcataggcgatttccgtccaagcggcggtttg

SEQ ID NO: 1829 - RNA, 121 nt, synthetic construct
  source 1..121: mol_type = other RNA
aaatatccaaaccgccgaaggttttagagctagaaatagcaagttaaaataaggctagtccgttatcaacttgaaaaagtggcaccgagtcggtgcatatgcatcgctcaacggcggtttg

SEQ ID NO: 1830 - RNA, 126 nt, synthetic construct
  source 1..126: mol_type = other RNA
aaatatccaaaccgccgaaggttttagagctagaaatagcaagttaaaataaggctagtccgttatcaacttgaaaaagtggcaccgagtcggtgcatcagcgtcttgcctggacccggcggtttg

SEQ ID NO: 1831 - RNA, 121 nt, synthetic construct
  source 1..121: mol_type = other RNA
aaatatccaaaccgccgaaggttttagagctagaaatagcaagttaaaataaggctagtccgttatcaacttgaaaaagtggcaccgagtcggtgcatgccaatggggcaacggcggtttg

SEQ ID NO: 1832 - RNA, 136 nt, synthetic construct
  source 1..136: mol_type = other RNA
aaatatccaaaccgccgaaggttttagagctagaaatagcaagttaaaataaggctagtccgttatcaacttgaaaaagtggcaccgagtcggtgcattcatgtgttcgattctccctcgggcacacggcggtttg

SEQ ID NO: 1833 - RNA, 136 nt, synthetic construct
  source 1..136: mol_type = other RNA
aaatatccaaaccgccgaaggttttagagctagaaatagcaagttaaaataaggctagtccgttatcaacttgaaaaagtggcaccgagtcggtgccgacaggagcgtcgcacacgctcggtctcccggcggtttg

SEQ ID NO: 1834 - RNA, 131 nt, synthetic construct
  source 1..131: mol_type = other RNA
aaatatccaaaccgccgaaggttttagagctagaaatagcaagttaaaataaggctagtccgttatcaacttgaaaaagtggcaccgagtcggtgccgccccgatcctcgtggccgctcggcggcggtttg

SEQ ID NO: 1835 - RNA, 131 nt, synthetic construct
  source 1..131: mol_type = other RNA
aaatatccaaaccgccgaaggttttagagctagaaatagcaagttaaaataaggctagtccgttatcaacttgaaaaagtggcaccgagtcggtgccgctccgcgaggaacccctccttcgcggcggtttg

SEQ ID NO: 1836 - RNA, 136 nt, synthetic construct
  source 1..136: mol_type = other RNA
aaatatccaaaccgccgaaggttttagagctagaaatagcaagttaaaataaggctagtccgttatcaacttgaaaaagtggcaccgagtcggtgccggagatcttgctaagacaaatgcaagattcggcggtttg

SEQ ID NO: 1837 - RNA, 131 nt, synthetic construct
  source 1..131: mol_type = other RNA
aaatatccaaaccgccgaaggttttagagctagaaatagcaagttaaaataaggctagtccgttatcaacttgaaaaagtggcaccgagtcggtgccgtgggtcgcaacacggcccctcagcggcggtttg

SEQ ID NO: 1838 - RNA, 136 nt, synthetic construct
  source 1..136: mol_type = other RNA
aaatatccaaaccgccgaaggttttagagctagaaatagcaagttaaaataaggctagtccgttatcaacttgaaaaagtggcaccgagtcggtgcgagggcgaacgacccgtccctctgcgggttcggcggtttg

SEQ ID NO: 1839 - RNA, 131 nt, synthetic construct
  source 1..131: mol_type = other RNA
aaatatccaaaccgccgaaggttttagagctagaaatagcaagttaaaataaggctagtccgttatcaacttgaaaaagtggcaccgagtcggtgcgcgcgatgtcagctacaccacttcgcggcggtttg

SEQ ID NO: 1840 - RNA, 126 nt, synthetic construct
  source 1..126: mol_type = other RNA
aaatatccaaaccgccgaaggttttagagctagaaatagcaagttaaaataaggctagtccgttatcaacttgaaaaagtggcaccgagtcggtgcgggaccccggtgtcccctttcggcggtttg

SEQ ID NO: 1841 - RNA, 136 nt, synthetic construct
  source 1..136: mol_type = other RNA
aaatatccaaaccgccgaaggttttagagctagaaatagcaagttaaaataaggctagtccgttatcaacttgaaaaagtggcaccgagtcggtgcgggcccggtccacctgggaccttcggcgcccggcggtttg

SEQ ID NO: 1842 - RNA, 136 nt, synthetic construct
  source 1..136: mol_type = other RNA
aaatatccaaaccgccgaaggttttagagctagaaatagcaagttaaaataaggctagtccgttatcaacttgaaaaagtggcaccgagtcggtgcggtagagaagtgacataatctttgttgtcgcggcggtttg

SEQ ID NO: 1843 - RNA, 126 nt, synthetic construct
  source 1..126: mol_type = other RNA
aaatatccaaaccgccgaaggttttagagctagaaatagcaagttaaaataaggctagtccgttatcaacttgaaaaagtggcaccgagtcggtgcggtcgcaactgtgtgcacctcggcggtttg

SEQ ID NO: 1844 - RNA, 126 nt, synthetic construct
  source 1..126: mol_type = other RNA
aaatatccaaaccgccgaaggttttagagctagaaatagcaagttaaaataaggctagtccgttatcaacttgaaaaagtggcaccgagtcggtgcgtcgcggtcactcgcgggatcggcggtttg

SEQ ID NO: 1845 - RNA, 131 nt, synthetic construct
  source 1..131: mol_type = other RNA
aaatatccaaaccgccgaaggttttagagctagaaatagcaagttaaaataaggctagtccgttatcaacttgaaaaagtggcaccgagtcggtgctcaagtcaggaaatatagagctgaccggcggtttg

SEQ ID NO: 1846 - RNA, 126 nt, synthetic construct
  source 1..126: mol_type = other RNA
aaatatccaaaccgccgaaggttttagagctagaaatagcaagttaaaataaggctagtccgttatcaacttgaaaaagtggcaccgagtcggtgctgtggcaattgtagccacctcggcggtttg

SEQ ID NO: 1847 - RNA, 126 nt, synthetic construct
  source 1..126: mol_type = other RNA
aaatatccaaaccgccgaaggttttagagctagaaatagcaagttaaaataaggctagtccgttatcaacttgaaaaagtggcaccgagtcggtgcttgtcgtagtgcacaccaaccggcggtttg

SEQ ID NO: 1848 - RNA, 126 nt, synthetic construct
  source 1..126: mol_type = other RNA
aaatatccaaaccgccgaaggttttagagctagaaatagcaagttaaaataaggctagtccgttatcaacttgaaaaagtggcaccgagtcggtgctttagttgggtacagctactcggcggtttg

SEQ ID NO: 1849 - RNA, 118 nt, synthetic construct
  source 1..118: mol_type = other RNA
aaatatccaaaccgccgaaggttttagagctagaaatagcaagttaaaataaggctagtccgttatcaacttgaaaaagtggcaccgagtcggtgcaagactgagtgccggcggtttg

SEQ ID NO: 1850 - RNA, 120 nt, synthetic construct
  source 1..120: mol_type = other RNA
aaatatccaaaccgccgaaggttttagagctagaaatagcaagttaaaataaggctagtccgttatcaacttgaaaaagtggcaccgagtcggtgcggaagactgagtgccggcggtttg

SEQ ID NO: 1851 - RNA, 122 nt, synthetic construct
  source 1..122: mol_type = other RNA
aaatatccaaaccgccgaaggttttagagctagaaatagcaagttaaaataaggctagtccgttatcaacttgaaaaagtggcaccgagtcggtgcttggaagactgagtgccggcggtttg

SEQ ID NO: 1852 - RNA, 124 nt, synthetic construct
  source 1..124: mol_type = other RNA
aaatatccaaaccgccgaaggttttagagctagaaatagcaagttaaaataaggctagtccgttatcaacttgaaaaagtggcaccgagtcggtgccgttggaagactgagtgccggcggtttg

SEQ ID NO: 1853 - RNA, 126 nt, synthetic construct
  source 1..126: mol_type = other RNA
aaatatccaaaccgccgaaggttttagagctagaaatagcaagttaaaataaggctagtccgttatcaacttgaaaaagtggcaccgagtcggtgccccgttggaagactgagtgccggcggtttg

SEQ ID NO: 1854 - RNA, 118 nt, synthetic construct
  source 1..118: mol_type = other RNA
aaatatccaaaccgccgaaggttttagagctagaaatagcaagttaaaataaggctagtccgttatcaacttgaaaaagtggcaccgagtcggtgccgcggccggcgacggcggtttg

SEQ ID NO: 1855 - RNA, 120 nt, synthetic construct
  source 1..120: mol_type = other RNA
aaatatccaaaccgccgaaggttttagagctagaaatagcaagttaaaataaggctagtccgttatcaacttgaaaaagtggcaccgagtcggtgctccgcggccggcgacggcggtttg

SEQ ID NO: 1856 - RNA, 122 nt, synthetic construct
  source 1..122: mol_type = other RNA
aaatatccaaaccgccgaaggttttagagctagaaatagcaagttaaaataaggctagtccgttatcaacttgaaaaagtggcaccgagtcggtgcggtccgcggccggcgacggcggtttg

SEQ ID NO: 1857 - RNA, 124 nt, synthetic construct
  source 1..124: mol_type = other RNA
aaatatccaaaccgccgaaggttttagagctagaaatagcaagttaaaataaggctagtccgttatcaacttgaaaaagtggcaccgagtcggtgccgggtccgcggccggcgacggcggtttg

SEQ ID NO: 1858 - RNA, 126 nt, synthetic construct
  source 1..126: mol_type = other RNA
aaatatccaaaccgccgaaggttttagagctagaaatagcaagttaaaataaggctagtccgttatcaacttgaaaaagtggcaccgagtcggtgcgccgggtccgcggccggcgacggcggtttg

SEQ ID NO: 1859 - RNA, 118 nt, synthetic construct
  source 1..118: mol_type = other RNA
aaatatccaaaccgccgaaggttttagagctagaaatagcaagttaaaataaggctagtccgttatcaacttgaaaaagtggcaccgagtcggtgcccagtcctgtgacggcggtttg

SEQ ID NO: 1860 - RNA, 120 nt, synthetic construct
  source 1..120: mol_type = other RNA
aaatatccaaaccgccgaaggttttagagctagaaatagcaagttaaaataaggctagtccgttatcaacttgaaaaagtggcaccgagtcggtgcctccagtcctgtgacggcggtttg

SEQ ID NO: 1861 - RNA, 122 nt, synthetic construct
  source 1..122: mol_type = other RNA
aaatatccaaaccgccgaaggttttagagctagaaatagcaagttaaaataaggctagtccgttatcaacttgaaaaagtggcaccgagtcggtgcagctccagtcctgtgacggcggtttg

SEQ ID NO: 1862 - RNA, 124 nt, synthetic construct
  source 1..124: mol_type = other RNA
aaatatccaaaccgccgaaggttttagagctagaaatagcaagttaaaataaggctagtccgttatcaacttgaaaaagtggcaccgagtcggtgcccagctccagtcctgtgacggcggtttg

SEQ ID NO: 1863 - RNA, 126 nt, synthetic construct
  source 1..126: mol_type = other RNA
aaatatccaaaccgccgaaggttttagagctagaaatagcaagttaaaataaggctagtccgttatcaacttgaaaaagtggcaccgagtcggtgcgcccagctccagtcctgtgacggcggtttg

SEQ ID NO: 1864 - RNA, 20 nt, synthetic construct
  source 1..20: mol_type = other RNA
tccacgtcagggcctcagcc

SEQ ID NO: 1865 - RNA, 17 nt, synthetic construct
  source 1..17: mol_type = other RNA
tgaggccctgacgtgga

SEQ ID NO: 1866 - RNA, 16 nt, synthetic construct
  source 1..16: mol_type = other RNA
tgaggccctgacgtgg

SEQ ID NO: 1867 - RNA, 15 nt, synthetic construct
  source 1..15: mol_type = other RNA
tgaggccctgacgtg

SEQ ID NO: 1868 - RNA, 14 nt, synthetic construct
  source 1..14: mol_type = other RNA
tgaggccctgacgt

SEQ ID NO: 1869 - RNA, 13 nt, synthetic construct
  source 1..13: mol_type = other RNA
tgaggccctgacg

SEQ ID NO: 1870 - RNA, 12 nt, synthetic construct
  source 1..12: mol_type = other RNA
tgaggccctgac

SEQ ID NO: 1871 - RNA, 11 nt, synthetic construct
  source 1..11: mol_type = other RNA
tgaggccctga

SEQ ID NO: 1872 - RNA, 10 nt, synthetic construct
  source 1..10: mol_type = other RNA
tgaggccctg

SEQ ID NO: 1873-1879 - skipped (7 entries)

SEQ ID NO: 1880 - RNA, 145 nt, synthetic construct
  source 1..145: mol_type = other RNA
tccacgtcagggcctcagccgttttagagctagaaatagcaagttaaaataaggctagtccgttatcaacttgaaaaagtggcaccgagtcggtgcatgatcctgacgacggagaccgccgtcgtcgacaagcctgaggccctga

SEQ ID NO: 1881 - RNA, 147 nt, synthetic construct
  source 1..147: mol_type = other RNA
tccacgtcagggcctcagccgttttagagctagaaatagcaagttaaaataaggctagtccgttatcaacttgaaaaagtggcaccgagtcggtgcatgatcctgacgacggagaccgccgtcgtcgacaagcctgaggccctgacg

SEQ ID NO: 1882 - RNA, 20 nt, synthetic construct
  source 1..20: mol_type = other RNA
aggatggaacacggacggcc

SEQ ID NO: 1883 - RNA, 17 nt, synthetic construct
  source 1..17: mol_type = other RNA
cgtccgtgttccatcct

SEQ ID NO: 1884 - RNA, 16 nt, synthetic construct
  source 1..16: mol_type = other RNA
cgtccgtgttccatcc

SEQ ID NO: 1885 - RNA, 15 nt, synthetic construct
  source 1..15: mol_type = other RNA
cgtccgtgttccatc

SEQ ID NO: 1886 - RNA, 14 nt, synthetic construct
  source 1..14: mol_type = other RNA
cgtccgtgttccat

SEQ ID NO: 1887 - RNA, 13 nt, synthetic construct
  source 1..13: mol_type = other RNA
cgtccgtgttcca

SEQ ID NO: 1888 - RNA, 12 nt, synthetic construct
  source 1..12: mol_type = other RNA
cgtccgtgttcc

SEQ ID NO: 1889 - RNA, 11 nt, synthetic construct
  source 1..11: mol_type = other RNA
cgtccgtgttc

SEQ ID NO: 1890 - RNA, 10 nt, synthetic construct
  source 1..10: mol_type = other RNA
cgtccgtgtt

SEQ ID NO: 1891-1897 - skipped (7 entries)

SEQ ID NO: 1898 - RNA, 145 nt, synthetic construct
  source 1..145: mol_type = other RNA
aggatggaacacggacggccgttttagagctagaaatagcaagttaaaataaggctagtccgttatcaacttgaaaaagtggcaccgagtcggtgcatgatcctgacgacggagaccgccgtcgtcgacaagcccgtccgtgttc

SEQ ID NO: 1899 - RNA, 147 nt, synthetic construct
  source 1..147: mol_type = other RNA
aggatggaacacggacggccgttttagagctagaaatagcaagttaaaataaggctagtccgttatcaacttgaaaaagtggcaccgagtcggtgcatgatcctgacgacggagaccgccgtcgtcgacaagcccgtccgtgttcca

SEQ ID NO: 1900 - RNA, 20 nt, synthetic construct
  source 1..20: mol_type = other RNA
ggtgcgtggaggatggaaca

SEQ ID NO: 1901 - RNA, 17 nt, synthetic construct
  source 1..17: mol_type = other RNA
tccatcctccacgcacc

SEQ ID NO: 1902 - RNA, 16 nt, synthetic construct
  source 1..16: mol_type = other RNA
tccatcctccacgcac

SEQ ID NO: 1903 - RNA, 15 nt, synthetic construct
  source 1..15: mol_type = other RNA
tccatcctccacgca

SEQ ID NO: 1904 - RNA, 14 nt, synthetic construct
  source 1..14: mol_type = other RNA
tccatcctccacgc

SEQ ID NO: 1905 - RNA, 13 nt, synthetic construct
  source 1..13: mol_type = other RNA
tccatcctccacg

SEQ ID NO: 1906 - RNA, 12 nt, synthetic construct
  source 1..12: mol_type = other RNA
tccatcctccac

SEQ ID NO: 1907 - RNA, 11 nt, synthetic construct
  source 1..11: mol_type = other RNA
tccatcctcca

SEQ ID NO: 1908 - RNA, 10 nt, synthetic construct
  source 1..10: mol_type = other RNA
tccatcctcc

SEQ ID NO: 1909-1915 - skipped (7 entries)

SEQ ID NO: 1916 - RNA, 144 nt, synthetic construct
  source 1..144: mol_type = other RNA
ggtgcgtggaggatggaacagttttagagctagaaatagcaagttaaaataaggctagtccgttatcaacttgaaaaagtggcaccgagtcggtgcatgatcctgacgacggagaccgccgtcgtcgacaagcctccatcctcc

SEQ ID NO: 1917 - RNA, 146 nt, synthetic construct
  source 1..146: mol_type = other RNA
ggtgcgtggaggatggaacagttttagagctagaaatagcaagttaaaataaggctagtccgttatcaacttgaaaaagtggcaccgagtcggtgcatgatcctgacgacggagaccgccgtcgtcgacaagcctccatcctccac

SEQ ID NO: 1918 - RNA, 20 nt, synthetic construct
  source 1..20: mol_type = other RNA
ttgcgaaccaacgataggtg

SEQ ID NO: 1919 - RNA, 17 nt, synthetic construct
  source 1..17: mol_type = other RNA
ctatcgttggttcgcaa

SEQ ID NO: 1920 - RNA, 16 nt, synthetic construct
  source 1..16: mol_type = other RNA
ctatcgttggttcgca

SEQ ID NO: 1921 - RNA, 15 nt, synthetic construct
  source 1..15: mol_type = other RNA
ctatcgttggttcgc

SEQ ID NO: 1922 - RNA, 14 nt, synthetic construct
  source 1..14: mol_type = other RNA
ctatcgttggttcg

SEQ ID NO: 1923 - RNA, 13 nt, synthetic construct
  source 1..13: mol_type = other RNA
ctatcgttggttc

SEQ ID NO: 1924 - RNA, 12 nt, synthetic construct
  source 1..12: mol_type = other RNA
ctatcgttggtt

SEQ ID NO: 1925 - RNA, 11 nt, synthetic construct
  source 1..11: mol_type = other RNA
ctatcgttggt

SEQ ID NO: 1926 - RNA, 10 nt, synthetic construct
  source 1..10: mol_type = other RNA
ctatcgttgg

SEQ ID NO: 1927-1933 - skipped (7 entries)

SEQ ID NO: 1934 - RNA, 144 nt, synthetic construct
  source 1..144: mol_type = other RNA
ttgcgaaccaacgataggtggttttagagctagaaatagcaagttaaaataaggctagtccgttatcaacttgaaaaagtggcaccgagtcggtgcatgatcctgacgacggagaccgccgtcgtcgacaagccctatcgttgg

SEQ ID NO: 1935 - RNA, 146 nt, synthetic construct
  source 1..146: mol_type = other RNA
ttgcgaaccaacgataggtggttttagagctagaaatagcaagttaaaataaggctagtccgttatcaacttgaaaaagtggcaccgagtcggtgcatgatcctgacgacggagaccgccgtcgtcgacaagccctatcgttggtt

SEQ ID NO: 1936 - RNA, 20 nt, synthetic construct
  source 1..20: mol_type = other RNA
gccagacgctccccagagca

SEQ ID NO: 1937 - RNA, 17 nt, synthetic construct
  source 1..17: mol_type = other RNA
tctggggagcgtctggc

SEQ ID NO: 1938 - RNA, 16 nt, synthetic construct
  source 1..16: mol_type = other RNA
tctggggagcgtctgg

SEQ ID NO: 1939 - RNA, 15 nt, synthetic construct
  source 1..15: mol_type = other RNA
tctggggagcgtctg

SEQ ID NO: 1940 - RNA, 14 nt, synthetic construct
  source 1..14: mol_type = other RNA
tctggggagcgtct

SEQ ID NO: 1941 - RNA, 13 nt, synthetic construct
  source 1..13: mol_type = other RNA
tctggggagcgtc

SEQ ID NO: 1942 - RNA, 12 nt, synthetic construct
  source 1..12: mol_type = other RNA
tctggggagcgt

SEQ ID NO: 1943 - RNA, 11 nt, synthetic construct
  source 1..11: mol_type = other RNA
tctggggagcg

SEQ ID NO: 1944 - RNA, 10 nt, synthetic construct
  source 1..10: mol_type = other RNA
tctggggagc

SEQ ID NO: 1945-1951 - skipped (7 entries)

SEQ ID NO: 1952 - RNA, 144 nt, synthetic construct
  source 1..144: mol_type = other RNA
gccagacgctccccagagcagttttagagctagaaatagcaagttaaaataaggctagtccgttatcaacttgaaaaagtggcaccgagtcggtgcatgatcctgacgacggagaccgccgtcgtcgacaagcctctggggagc

SEQ ID NO: 1953 - RNA, 146 nt, synthetic construct
  source 1..146: mol_type = other RNA
gccagacgctccccagagcagttttagagctagaaatagcaagttaaaataaggctagtccgttatcaacttgaaaaagtggcaccgagtcggtgcatgatcctgacgacggagaccgccgtcgtcgacaagcctctggggagcgt

SEQ ID NO: 1954 - RNA, 142 nt, synthetic construct
  source 1..142: mol_type = other RNA
gccagacgctccccagagcagttttagagctagaaatagcaagttaaaataaggctagtccgttatcaacttgaaaaagtggcaccgagtcggtgcatgatcctgacgacggagaccgccgtcgtcgacaagcctctgggga

SEQ ID NO: 1955 - RNA, 143 nt, synthetic construct
  source 1..143: mol_type = other RNA
gccagacgctccccagagcagttttagagctagaaatagcaagttaaaataaggctagtccgttatcaacttgaaaaagtggcaccgagtcggtgcatgatcctgacgacggagaccgccgtcgtcgacaagcctctggggag

SEQ ID NO: 1956 - RNA, 145 nt, synthetic construct
  source 1..145: mol_type = other RNA
gccagacgctccccagagcagttttagagctagaaatagcaagttaaaataaggctagtccgttatcaacttgaaaaagtggcaccgagtcggtgcatgatcctgacgacggagaccgccgtcgtcgacaagcctctggggagcg

SEQ ID NO: 1957 - RNA, 147 nt, synthetic construct
  source 1..147: mol_type = other RNA
gccagacgctccccagagcagttttagagctagaaatagcaagttaaaataaggctagtccgttatcaacttgaaaaagtggcaccgagtcggtgcatgatcctgacgacggagaccgccgtcgtcgacaagcctctggggagcgtc

SEQ ID NO: 1958 - RNA, 148 nt, synthetic construct
  source 1..148: mol_type = other RNA
gccagacgctccccagagcagttttagagctagaaatagcaagttaaaataaggctagtccgttatcaacttgaaaaagtggcaccgagtcggtgcatgatcctgacgacggagaccgccgtcgtcgacaagcctctggggagcgtct

SEQ ID NO: 1959 - RNA, 149 nt, synthetic construct
  source 1..149: mol_type = other RNA
gccagacgctccccagagcagttttagagctagaaatagcaagttaaaataaggctagtccgttatcaacttgaaaaagtggcaccgagtcggtgcatgatcctgacgacggagaccgccgtcgtcgacaagcctctggggagcgtctg

SEQ ID NO: 1960 - RNA, 150 nt, synthetic construct
  source 1..150: mol_type = other RNA
gccagacgctccccagagcagttttagagctagaaatagcaagttaaaataaggctagtccgttatcaacttgaaaaagtggcaccgagtcggtgcatgatcctgacgacggagaccgccgtcgtcgacaagcctctggggagcgtctgg

SEQ ID NO: 1961 - RNA, 151 nt, synthetic construct
  source 1..151: mol_type = other RNA
gccagacgctccccagagcagttttagagctagaaatagcaagttaaaataaggctagtccgttatcaacttgaaaaagtggcaccgagtcggtgcatgatcctgacgacggagaccgccgtcgtcgacaagcctctggggagcgtctggc

SEQ ID NO: 1962 - RNA, 131 nt, synthetic construct
  source 1..131: mol_type = other RNA
gccagacgctccccagagcagttttagagctagaaatagcaagttaaaataaggctagtccgttatcaacttgaaaaagtggcaccgagtcggtgctggttaaatgctatggaagcgaacttctggggagc

SEQ ID NO: 1963 - RNA, 146 nt, synthetic construct
  source 1..146: mol_type = other RNA
gccagacgctccccagagcagttttagagctagaaatagcaagttaaaataaggctagtccgttatcaacttgaaaaagtggcaccgagtcggtgcataccctaatgacctgtcctttactctcggccggcagtattctggggagc

SEQ ID NO: 1964 - RNA, 134 nt, synthetic construct
  source 1..134: mol_type = other RNA
gccagacgctccccagagcagttttagagctagaaatagcaagttaaaataaggctagtccgttatcaacttgaaaaagtggcaccgagtcggtgccgtatcatattaaataccaacgagatattctggggagc

SEQ ID NO: 1965 - RNA, 126 nt, synthetic construct
  source 1..126: mol_type = other RNA
gccagacgctccccagagcagttttagagctagaaatagcaagttaaaataaggctagtccgttatcaacttgaaaaagtggcaccgagtcggtgcctctctcttctgactcgctttctggggagc

SEQ ID NO: 1966 - RNA, 134 nt, synthetic construct
  source 1..134: mol_type = other RNA
gccagacgctccccagagcagttttagagctagaaatagcaagttaaaataaggctagtccgttatcaacttgaaaaagtggcaccgagtcggtgcttctggaggcacgcgtgcgtcgcttgattctggggagc

SEQ ID NO: 1967 - RNA, 124 nt, synthetic construct
  source 1..124: mol_type = other RNA
gccagacgctccccagagcagttttagagctagaaatagcaagttaaaataaggctagtccgttatcaacttgaaaaagtggcaccgagtcggtgccggccaccagcgcgcgattctggggagc

SEQ ID NO: 1968 - RNA, 144 nt, synthetic construct
  source 1..144: mol_type = other RNA
gccagacgctccccagagcagttttagagctagaaatagcaagttaaaataaggctagtccgttatcaacttgaaaaagtggcaccgagtcggtgcggcttgtcgacgacggcggtctccgtcgtcaggatcattctggggagc

SEQ ID NO: 1969 - RNA, 124 nt, synthetic construct
  source 1..124: mol_type = other RNA
gccagacgctccccagagcagttttagagctagaaatagcaagttaaaataaggctagtccgttatcaacttgaaaaagtggcaccgagtcggtgcgcccgacagcgcgcgcattctggggagc

SEQ ID NO: 1970 - RNA, 131 nt, synthetic construct
  source 1..131: mol_type = other RNA
gccagacgctccccagagcagttttagagctagaaatagcaagttaaaataaggctagtccgttatcaacttgaaaaagtggcaccgagtcggtgcttacagcctgggcgcgtggacgcattctggggagc

SEQ ID NO: 1971 - RNA, 131 nt, synthetic construct
  source 1..131: mol_type = other RNA
gccagacgctccccagagcagttttagagctagaaatagcaagttaaaataaggctagtccgttatcaacttgaaaaagtggcaccgagtcggtgcccgtagtattgacacctactgccattctggggagc

SEQ ID NO: 1972 - RNA, 136 nt, synthetic construct
  source 1..136: mol_type = other RNA
gccagacgctccccagagcagttttagagctagaaatagcaagttaaaataaggctagtccgttatcaacttgaaaaagtggcaccgagtcggtgcctccgttcttcggcgcgctgagtccgccattctggggagc

SEQ ID NO: 1973 - RNA, 141 nt, synthetic construct
  source 1..141: mol_type = other RNA
gccagacgctccccagagcagttttagagctagaaatagcaagttaaaataaggctagtccgttatcaacttgaaaaagtggcaccgagtcggtgcactgagaggcggggcgcgggtcgttaaggccccattctggggagc

SEQ ID NO: 1974 - RNA, 121 nt, synthetic construct
  source 1..121: mol_type = other RNA
gccagacgctccccagagcagttttagagctagaaatagcaagttaaaataaggctagtccgttatcaacttgaaaaagtggcaccgagtcggtgcggacggcccgtacattctggggagc

SEQ ID NO: 1975 - RNA, 121 nt, synthetic construct
  source 1..121: mol_type = other RNA
gccagacgctccccagagcagttttagagctagaaatagcaagttaaaataaggctagtccgttatcaacttgaaaaagtggcaccgagtcggtgcccgcttgcgaacaattctggggagc

SEQ ID NO: 1976 - RNA, 136 nt, synthetic construct
  source 1..136: mol_type = other RNA
gccagacgctccccagagcagttttagagctagaaatagcaagttaaaataaggctagtccgttatcaacttgaaaaagtggcaccgagtcggtgcgtaatccaagctcactaggggcacaacttgtctggggagc

SEQ ID NO: 1977 - RNA, 146 nt, synthetic construct
  source 1..146: mol_type = other RNA
gccagacgctccccagagcagttttagagctagaaatagcaagttaaaataaggctagtccgttatcaacttgaaaaagtggcaccgagtcggtgctttagtaacagacacactagggacggttatacgaacattgtctggggagc

SEQ ID NO: 1978 - RNA, 141 nt, synthetic construct
  source 1..141: mol_type = other RNA
gccagacgctccccagagcagttttagagctagaaatagcaagttaaaataaggctagtccgttatcaacttgaaaaagtggcaccgagtcggtgcccccggccccgggcccgggagcggcgggccgggtgtctggggagc

SEQ ID NO: 1979 - RNA, 116 nt, synthetic construct
  source 1..116: mol_type = other RNA
gccagacgctccccagagcagttttagagctagaaatagcaagttaaaataaggctagtccgttatcaacttgaaaaagtggcaccgagtcggtgccccgccggtgtctggggagc

SEQ ID NO: 1980 - RNA, 136 nt, synthetic construct
  source 1..136: mol_type = other RNA
gccagacgctccccagagcagttttagagctagaaatagcaagttaaaataaggctagtccgttatcaacttgaaaaagtggcaccgagtcggtgcagcccagttactcaatttcctgtaatagtgtctggggagc

SEQ ID NO: 1981 - RNA, 134 nt, synthetic construct
  source 1..134: mol_type = other RNA
gccagacgctccccagagcagttttagagctagaaatagcaagttaaaataaggctagtccgttatcaacttgaaaaagtggcaccgagtcggtgcaagcgtggcatgagtgcgccaccgtctgtctggggagc

SEQ ID NO: 1982 - RNA, 136 nt, synthetic construct
  source 1..136: mol_type = other RNA
gccagacgctccccagagcagttttagagctagaaatagcaagttaaaataaggctagtccgttatcaacttgaaaaagtggcaccgagtcggtgcctgctagggcggtacgccggcggggcgctgtctggggagc

SEQ ID NO: 1983 - RNA, 116 nt, synthetic construct
  source 1..116: mol_type = other RNA
gccagacgctccccagagcagttttagagctagaaatagcaagttaaaataaggctagtccgttatcaacttgaaaaagtggcaccgagtcggtgcagcagctatgtctggggagc

SEQ ID NO: 1984 - RNA, 124 nt, synthetic construct
  source 1..124: mol_type = other RNA
gccagacgctccccagagcagttttagagctagaaatagcaagttaaaataaggctagtccgttatcaacttgaaaaagtggcaccgagtcggtgccggggagctccgctgatgtctggggagc

SEQ ID NO: 1985 - RNA, 134 nt, synthetic construct
  source 1..134: mol_type = other RNA
gccagacgctccccagagcagttttagagctagaaatagcaagttaaaataaggctagtccgttatcaacttgaaaaagtggcaccgagtcggtgccacgagctccgccaagtgaccaccgatgtctggggagc

SEQ ID NO: 1986 - RNA, 124 nt, synthetic construct
  source 1..124: mol_type = other RNA
gccagacgctccccagagcagttttagagctagaaatagcaagttaaaataaggctagtccgttatcaacttgaaaaagtggcaccgagtcggtgccactataggtatgcaatgtctggggagc

SEQ ID NO: 1987 - RNA, 134 nt, synthetic construct
  source 1..134: mol_type = other RNA
gccagacgctccccagagcagttttagagctagaaatagcaagttaaaataaggctagtccgttatcaacttgaaaaagtggcaccgagtcggtgctgcaccattcaatcgttccttgtcctggtctggggagc

SEQ ID NO: 1988 - RNA, 128 nt, synthetic construct
  source 1..128: mol_type = other RNA
gccagacgctccccagagcagttttagagctagaaatagcaagttaaaataaggctagtccgttatcaacttgaaaaagtggcaccgagtcggtgcgggaccatatggtaccacctggtctggggagc

SEQ ID NO: 1989 - RNA, 126 nt, synthetic construct
  source 1..126: mol_type = other RNA
gccagacgctccccagagcagttttagagctagaaatagcaagttaaaataaggctagtccgttatcaacttgaaaaagtggcaccgagtcggtgcgccggagcagggccgactggtctggggagc

SEQ ID NO: 1990 - RNA, 128 nt, synthetic construct
  source 1..128: mol_type = other RNA
gccagacgctccccagagcagttttagagctagaaatagcaagttaaaataaggctagtccgttatcaacttgaaaaagtggcaccgagtcggtgccatcggccgccggcggttggggtctggggagc

SEQ ID NO: 1991 - RNA, 121 nt, synthetic construct
  source 1..121: mol_type = other RNA
gccagacgctccccagagcagttttagagctagaaatagcaagttaaaataaggctagtccgttatcaacttgaaaaagtggcaccgagtcggtgccggtccggcccggggtctggggagc

SEQ ID NO: 1992 - RNA, 134 nt, synthetic construct
  source 1..134: mol_type = other RNA
gccagacgctccccagagcagttttagagctagaaatagcaagttaaaataaggctagtccgttatcaacttgaaaaagtggcaccgagtcggtgcggcggcgggagcggcccgtacgacggggtctggggagc

SEQ ID NO: 1993 - RNA, 141 nt, synthetic construct
  source 1..141: mol_type = other RNA
gccagacgctccccagagcagttttagagctagaaatagcaagttaaaataaggctagtccgttatcaacttgaaaaagtggcaccgagtcggtgctagcacgtggtttcgcccttctggctacctaggggtctggggagc

SEQ ID NO: 1994 - RNA, 141 nt, synthetic construct
  source 1..141: mol_type = other RNA
gccagacgctccccagagcagttttagagctagaaatagcaagttaaaataaggctagtccgttatcaacttgaaaaagtggcaccgagtcggtgccgcgctagcgggaccggatgtcccctgccctactttctggggagc

SEQ ID NO: 1995 - RNA, 131 nt, synthetic construct
  source 1..131: mol_type = other RNA
gccagacgctccccagagcagttttagagctagaaatagcaagttaaaataaggctagtccgttatcaacttgaaaaagtggcaccgagtcggtgcacggaaggcgcggtccgcgcaggggtctggggagc

SEQ ID NO: 1996 - RNA, 141 nt, synthetic construct
  source 1..141: mol_type = other RNA
gccagacgctccccagagcagttttagagctagaaatagcaagttaaaataaggctagtccgttatcaacttgaaaaagtggcaccgagtcggtgcccgccgagcggccaccctagggctggcggcgcgggtctggggagc

SEQ ID NO: 1997 - RNA, 124 nt, synthetic construct
  source 1..124: mol_type = other RNA
gccagacgctccccagagcagttttagagctagaaatagcaagttaaaataaggctagtccgttatcaacttgaaaaagtggcaccgagtcggtgcggctcctcctcgcgcgggtctggggagc

SEQ ID NO: 1998 - RNA, 121 nt, synthetic construct
  source 1..121: mol_type = other RNA
gccagacgctccccagagcagttttagagctagaaatagcaagttaaaataaggctagtccgttatcaacttgaaaaagtggcaccgagtcggtgccggctggtcgccgggtctggggagc

SEQ ID NO: 1999 - RNA, 131 nt, synthetic construct
  source 1..131: mol_type = other RNA
gccagacgctccccagagcagttttagagctagaaatagcaagttaaaataaggctagtccgttatcaacttgaaaaagtggcaccgagtcggtgcggccgggcctcgcggggcgcccgggtctggggagc

SEQ ID NO: 2000 - RNA, 136 nt, synthetic construct
  source 1..136: mol_type = other RNA
gccagacgctccccagagcagttttagagctagaaatagcaagttaaaataaggctagtccgttatcaacttgaaaaagtggcaccgagtcggtgccacgtgcgcttcgggtttcgttcgccgatttctggggagc

SEQ ID NO: 2001 - RNA, 136 nt, synthetic construct
  source 1..136: mol_type = other RNA
gccagacgctccccagagcagttttagagctagaaatagcaagttaaaataaggctagtccgttatcaacttgaaaaagtggcaccgagtcggtgcgcgcgctgaccggcgcggccaccacccgggtctggggagc

SEQ ID NO: 2002 - RNA, 124 nt, synthetic construct
  source 1..124: mol_type = other RNA
gccagacgctccccagagcagttttagagctagaaatagcaagttaaaataaggctagtccgttatcaacttgaaaaagtggcaccgagtcggtgccggcgcgctgtacgagggtctggggagc

SEQ ID NO: 2003 - RNA, 128 nt, synthetic construct
  source 1..128: mol_type = other RNA
gccagacgctccccagagcagttttagagctagaaatagcaagttaaaataaggctagtccgttatcaacttgaaaaagtggcaccgagtcggtgcaggcggttcgatgagccggcggtctggggagc

SEQ ID NO: 2004 - RNA, 121 nt, synthetic construct
  source 1..121: mol_type = other RNA
gccagacgctccccagagcagttttagagctagaaatagcaagttaaaataaggctagtccgttatcaacttgaaaaagtggcaccgagtcggtgcctttacatcagaatttctggggagc

SEQ ID NO: 2005 - RNA, 134 nt, synthetic construct
  source 1..134: mol_type = other RNA
gccagacgctccccagagcagttttagagctagaaatagcaagttaaaataaggctagtccgttatcaacttgaaaaagtggcaccgagtcggtgcggcaccggggcaccgccaccccacgcggtctggggagc

SEQ ID NO: 2006 - RNA, 126 nt, synthetic construct
  source 1..126: mol_type = other RNA
gccagacgctccccagagcagttttagagctagaaatagcaagttaaaataaggctagtccgttatcaacttgaaaaagtggcaccgagtcggtgcttccggtcggagccctccggtctggggagc

SEQ ID NO: 2007 - RNA, 116 nt, synthetic construct
  source 1..116: mol_type = other RNA
gccagacgctccccagagcagttttagagctagaaatagcaagttaaaataaggctagtccgttatcaacttgaaaaagtggcaccgagtcggtgccccttgccggtctggggagc

SEQ ID NO: 2008 - RNA, 124 nt, synthetic construct
  source 1..124: mol_type = other RNA
gccagacgctccccagagcagttttagagctagaaatagcaagttaaaataaggctagtccgttatcaacttgaaaaagtggcaccgagtcggtgcaggcaggatcttgaaatttctggggagc

SEQ ID NO: 2009 - RNA, 136 nt, synthetic construct
  source 1..136: mol_type = other RNA
gccagacgctccccagagcagttttagagctagaaatagcaagttaaaataaggctagtccgttatcaacttgaaaaagtggcaccgagtcggtgcgcacgctctcgtcggtccgccctgcgccggtctggggagc

SEQ ID NO: 2010 - RNA, 134 nt, synthetic construct
  source 1..134: mol_type = other RNA
gccagacgctccccagagcagttttagagctagaaatagcaagttaaaataaggctagtccgttatcaacttgaaaaagtggcaccgagtcggtgccgccgcgcaccgcgcgtggcgtccccggtctggggagc

SEQ ID NO: 2011 - RNA, 121 nt, synthetic construct
  source 1..121: mol_type = other RNA
gccagacgctccccagagcagttttagagctagaaatagcaagttaaaataaggctagtccgttatcaacttgaaaaagtggcaccgagtcggtgccccggcgccacccggtctggggagc

SEQ ID NO: 2012 - RNA, 136 nt, synthetic construct
  source 1..136: mol_type = other RNA
gccagacgctccccagagcagttttagagctagaaatagcaagttaaaataaggctagtccgttatcaacttgaaaaagtggcaccgagtcggtgcgctccgcatggtctctgaacggacgaccggtctggggagc

SEQ ID NO: 2013 - RNA, 131 nt, synthetic construct
  source 1..131: mol_type = other RNA
gccagacgctccccagagcagttttagagctagaaatagcaagttaaaataaggctagtccgttatcaacttgaaaaagtggcaccgagtcggtgccgcgcgcgctgcggagggtggtaggtctggggagc

SEQ ID NO: 2014 - RNA, 128 nt, synthetic construct
  source 1..128: mol_type = other RNA
gccagacgctccccagagcagttttagagctagaaatagcaagttaaaataaggctagtccgttatcaacttgaaaaagtggcaccgagtcggtgcggggccctccgacccgcctaggtctggggagc

SEQ ID NO: 2015 - RNA, 146 nt, synthetic construct
  source 1..146: mol_type = other RNA
gccagacgctccccagagcagttttagagctagaaatagcaagttaaaataaggctagtccgttatcaacttgaaaaagtggcaccgagtcggtgcggtgttcccaagcgaagtccctctggcaaaggtgaggaggtctggggagc

SEQ ID NO: 2016 - RNA, 136 nt, synthetic construct
  source 1..136: mol_type = other RNA
gccagacgctccccagagcagttttagagctagaaatagcaagttaaaataaggctagtccgttatcaacttgaaaaagtggcaccgagtcggtgcctgtacccgtagccgcggccccatccgaggtctggggagc

SEQ ID NO: 2017 - RNA, 121 nt, synthetic construct
  source 1..121: mol_type = other RNA
gccagacgctccccagagcagttttagagctagaaatagcaagttaaaataaggctagtccgttatcaacttgaaaaagtggcaccgagtcggtgccacctgcccagctgttctggggagc

SEQ ID NO: 2018 - RNA, 131 nt, synthetic construct
  source 1..131: mol_type = other RNA
gccagacgctccccagagcagttttagagctagaaatagcaagttaaaataaggctagtccgttatcaacttgaaaaagtggcaccgagtcggtgccgactgctcggcgcagcccacaaggtctggggagc

SEQ ID NO: 2019 - RNA, 126 nt, synthetic construct
  source 1..126: mol_type = other RNA
gccagacgctccccagagcagttttagagctagaaatagcaagttaaaataaggctagtccgttatcaacttgaaaaagtggcaccgagtcggtgcccggcctggccttctaaaggtctggggagc

SEQ ID NO: 2020 - RNA, 146 nt, synthetic construct
  source 1..146: mol_type = other RNA
gccagacgctccccagagcagttttagagctagaaatagcaagttaaaataaggctagtccgttatcaacttgaaaaagtggcaccgagtcggtgcgcctgcacccttgctcctcgacgagggcccgcaccggtcgtctggggagc

SEQ ID NO: 2021 - RNA, 116 nt, synthetic construct
  source 1..116: mol_type = other RNA
gccagacgctccccagagcagttttagagctagaaatagcaagttaaaataaggctagtccgttatcaacttgaaaaagtggcaccgagtcggtgccgctcgctcgtctggggagc

SEQ ID NO: 2022 - RNA, 134 nt, synthetic construct
  source 1..134: mol_type = other RNA
gccagacgctccccagagcagttttagagctagaaatagcaagttaaaataaggctagtccgttatcaacttgaaaaagtggcaccgagtcggtgcatcccttgcttccccacgggtaagctcgtctggggagc

SEQ ID NO: 2023 - RNA, 136 nt, synthetic construct
  source 1..136: mol_type = other RNA
gccagacgctccccagagcagttttagagctagaaatagcaagttaaaataaggctagtccgttatcaacttgaaaaagtggcaccgagtcggtgcgcgcggcgtctactcctcgcctctacctcgtctggggagc

SEQ ID NO: 2024 - RNA, 134 nt, synthetic construct
  source 1..134: mol_type = other RNA
gccagacgctccccagagcagttttagagctagaaatagcaagttaaaataaggctagtccgttatcaacttgaaaaagtggcaccgagtcggtgcgcaatgcaccgccgtgggcgccgtatcgtctggggagc

SEQ ID NO: 2025 - RNA, 124 nt, synthetic construct
  source 1..124: mol_type = other RNA
gccagacgctccccagagcagttttagagctagaaatagcaagttaaaataaggctagtccgttatcaacttgaaaaagtggcaccgagtcggtgccggtgttcgggaagatcgtctggggagc

SEQ ID NO: 2026 - RNA, 121 nt, synthetic construct
  source 1..121: mol_type = other RNA
gccagacgctccccagagcagttttagagctagaaatagcaagttaaaataaggctagtccgttatcaacttgaaaaagtggcaccgagtcggtgccgggccccgcgtgcgtctggggagc

SEQ ID NO: 2027 - RNA, 141 nt, synthetic construct
  source 1..141: mol_type = other RNA
gccagacgctccccagagcagttttagagctagaaatagcaagttaaaataaggctagtccgttatcaacttgaaaaagtggcaccgagtcggtgctaatgcagcaacggtcgcgactccctgtgactgcgtctggggagc

SEQ ID NO: 2028 - RNA, 141 nt, synthetic construct
  source 1..141: mol_type = other RNA
gccagacgctccccagagcagttttagagctagaaatagcaagttaaaataaggctagtccgttatcaacttgaaaaagtggcaccgagtcggtgcgggtgccatcttcctgggtagaggcgggacatgcgtctggggagc

SEQ ID NO: 2029 - RNA, 126 nt, synthetic construct
  source 1..126: mol_type = other RNA
gccagacgctccccagagcagttttagagctagaaatagcaagttaaaataaggctagtccgttatcaacttgaaaaagtggcaccgagtcggtgctgcgagcgccccgcggggcgtctggggagc

SEQ ID NO: 2030 - RNA, 141 nt, synthetic construct
  source 1..141: mol_type = other RNA
gccagacgctccccagagcagttttagagctagaaatagcaagttaaaataaggctagtccgttatcaacttgaaaaagtggcaccgagtcggtgcggccgatgccagtgacccgttcaacgggccgggcgtctggggagc

SEQ ID NO: 2031 - RNA, 141 nt, synthetic construct
  source 1..141: mol_type = other RNA
gccagacgctccccagagcagttttagagctagaaatagcaagttaaaataaggctagtccgttatcaacttgaaaaagtggcaccgagtcggtgccgcggcggccggcaccgcgtcgcgcgctggcggcgtctggggagc

SEQ ID NO: 2032 - RNA, 141 nt, synthetic construct
  source 1..141: mol_type = other RNA
gccagacgctccccagagcagttttagagctagaaatagcaagttaaaataaggctagtccgttatcaacttgaaaaagtggcaccgagtcggtgcttccgcccgcccgcgcccgggcccagcccgcggcgtctggggagc

SEQ ID NO: 2033 - RNA, 134 nt, synthetic construct
  source 1..134: mol_type = other RNA
gccagacgctccccagagcagttttagagctagaaatagcaagttaaaataaggctagtccgttatcaacttgaaaaagtggcaccgagtcggtgctttccgaattggaaaggttgtcctcgcgtctggggagc

SEQ ID NO: 2034 - RNA, 124 nt, synthetic construct
  source 1..124: mol_type = other RNA
gccagacgctccccagagcagttttagagctagaaatagcaagttaaaataaggctagtccgttatcaacttgaaaaagtggcaccgagtcggtgcggcaccccggcgtgcgcgtctggggagc

SEQ ID NO: 2035 - RNA, 131 nt, synthetic construct
  source 1..131: mol_type = other RNA
gccagacgctccccagagcagttttagagctagaaatagcaagttaaaataaggctagtccgttatcaacttgaaaaagtggcaccgagtcggtgcgccaggccccgaccgctggagcgcgtctggggagc

SEQ ID NO: 2036 - RNA, 128 nt, synthetic construct
  source 1..128: mol_type = other RNA
gccagacgctccccagagcagttttagagctagaaatagcaagttaaaataaggctagtccgttatcaacttgaaaaagtggcaccgagtcggtgccgacctattgggacgcggagcgtctggggagc

SEQ ID NO: 2037 - RNA, 141 nt, synthetic construct
  source 1..141: mol_type = other RNA
gccagacgctccccagagcagttttagagctagaaatagcaagttaaaataaggctagtccgttatcaacttgaaaaagtggcaccgagtcggtgcccgcgcgtgccaggccccgacgggaggccccagcgtctggggagc

SEQ ID NO: 2038 - RNA, 121 nt, synthetic construct
  source 1..121: mol_type = other RNA
gccagacgctccccagagcagttttagagctagaaatagcaagttaaaataaggctagtccgttatcaacttgaaaaagtggcaccgagtcggtgcccggtagcacgtccgtctggggagc

SEQ ID NO: 2039 - RNA, 116 nt, synthetic construct
  source 1..116: mol_type = other RNA
gccagacgctccccagagcagttttagagctagaaatagcaagttaaaataaggctagtccgttatcaacttgaaaaagtggcaccgagtcggtgcccgtcctccgtctggggagc

SEQ ID NO: 2040 - RNA, 136 nt, synthetic construct
  source 1..136: mol_type = other RNA
gccagacgctccccagagcagttttagagctagaaatagcaagttaaaataaggctagtccgttatcaacttgaaaaagtggcaccgagtcggtgctcggccccgcgccaggggcgcgatccgccgtctggggagc

SEQ ID NO: 2041 - RNA, 126 nt, synthetic construct
  source 1..126: mol_type = other RNA
gccagacgctccccagagcagttttagagctagaaatagcaagttaaaataaggctagtccgttatcaacttgaaaaagtggcaccgagtcggtgcgggcgcacatcggcggcccgtctggggagc

SEQ ID NO: 2042 - RNA, 124 nt, synthetic construct
  source 1..124: mol_type = other RNA
gccagacgctccccagagcagttttagagctagaaatagcaagttaaaataaggctagtccgttatcaacttgaaaaagtggcaccgagtcggtgcgcccgctcccgccgcccgtctggggagc

SEQ ID NO: 2043 - RNA, 124 nt, synthetic construct
  source 1..124: mol_type = other RNA
gccagacgctccccagagcagttttagagctagaaatagcaagttaaaataaggctagtccgttatcaacttgaaaaagtggcaccgagtcggtgcttcttgcggtgcggaccgtctggggagc

SEQ ID NO: 2044 - RNA, 131 nt, synthetic construct
  source 1..131: mol_type = other RNA
gccagacgctccccagagcagttttagagctagaaatagcaagttaaaataaggctagtccgttatcaacttgaaaaagtggcaccgagtcggtgcgcatgcacaggcacaatgtctgttttctggggagc

SEQ ID NO: 2045 - RNA, 146 nt, synthetic construct
  source 1..146: mol_type = other RNA
gccagacgctccccagagcagttttagagctagaaatagcaagttaaaataaggctagtccgttatcaacttgaaaaagtggcaccgagtcggtgccggcagactcgcgcgtgggccgggccccgtccgggcgacgtctggggagc

SEQ ID NO: 2046 - RNA, 141 nt, synthetic construct
  source 1..141: mol_type = other RNA
gccagacgctccccagagcagttttagagctagaaatagcaagttaaaataaggctagtccgttatcaacttgaaaaagtggcaccgagtcggtgcgcctcccgctcacactccaaccggctgcgggcacgtctggggagc

SEQ ID NO: 2047 - RNA, 131 nt, synthetic construct
  source 1..131: mol_type = other RNA
gccagacgctccccagagcagttttagagctagaaatagcaagttaaaataaggctagtccgttatcaacttgaaaaagtggcaccgagtcggtgcgggccgaaccggacctacggccacgtctggggagc

SEQ ID NO: 2048 - RNA, 126 nt, synthetic construct
  source 1..126: mol_type = other RNA
gccagacgctccccagagcagttttagagctagaaatagcaagttaaaataaggctagtccgttatcaacttgaaaaagtggcaccgagtcggtgccccgtcgcggaggagggtagtctggggagc

SEQ ID NO: 2049 - RNA, 141 nt, synthetic construct
  source 1..141: mol_type = other RNA
gccagacgctccccagagcagttttagagctagaaatagcaagttaaaataaggctagtccgttatcaacttgaaaaagtggcaccgagtcggtgcgtgttgagcccgcgaggtcgttcggcggtaacggttctggggagc

SEQ ID NO: 2050 - RNA, 126 nt, synthetic construct
  source 1..126: mol_type = other RNA
gccagacgctccccagagcagttttagagctagaaatagcaagttaaaataaggctagtccgttatcaacttgaaaaagtggcaccgagtcggtgcatgcagacctgccacgctagtctggggagc

SEQ ID NO: 2051 - RNA, 131 nt, synthetic construct
  source 1..131: mol_type = other RNA
gccagacgctccccagagcagttttagagctagaaatagcaagttaaaataaggctagtccgttatcaacttgaaaaagtggcaccgagtcggtgcccggctccgtagcgatcgaagctagtctggggagc

SEQ ID NO: 2052 - RNA, 124 nt, synthetic construct
  source 1..124: mol_type = other RNA
gccagacgctccccagagcagttttagagctagaaatagcaagttaaaataaggctagtccgttatcaacttgaaaaagtggcaccgagtcggtgcgacgctcggaccggatagtctggggagc

SEQ ID NO: 2053 - RNA, 131 nt, synthetic construct
  source 1..131: mol_type = other RNA
gccagacgctccccagagcagttttagagctagaaatagcaagttaaaataaggctagtccgttatcaacttgaaaaagtggcaccgagtcggtgcggcagcgggctcggggacccgtgagtctggggagc

SEQ ID NO: 2054 - RNA, 126 nt, synthetic construct
  source 1..126: mol_type = other RNA
gccagacgctccccagagcagttttagagctagaaatagcaagttaaaataaggctagtccgttatcaacttgaaaaagtggcaccgagtcggtgcgggactacactagggcggagtctggggagc

SEQ ID NO: 2055 - RNA, 121 nt, synthetic construct
  source 1..121: mol_type = other RNA
gccagacgctccccagagcagttttagagctagaaatagcaagttaaaataaggctagtccgttatcaacttgaaaaagtggcaccgagtcggtgcagaacggccaaaggttctggggagc

SEQ ID NO: 2056 - RNA, 121 nt, synthetic construct
  source 1..121: mol_type = other RNA
gccagacgctccccagagcagttttagagctagaaatagcaagttaaaataaggctagtccgttatcaacttgaaaaagtggcaccgagtcggtgcgtggtccgactcgagtctggggagc

SEQ ID NO: 2057 - RNA, 136 nt, synthetic construct
  source 1..136: mol_type = other RNA
gccagacgctccccagagcagttttagagctagaaatagcaagttaaaataaggctagtccgttatcaacttgaaaaagtggcaccgagtcggtgcgctctttcagcggctaaatcttagagcgagtctggggagc

SEQ ID NO: 2058 - RNA, 116 nt, synthetic construct
  source 1..116: mol_type = other RNA
gccagacgctccccagagcagttttagagctagaaatagcaagttaaaataaggctagtccgttatcaacttgaaaaagtggcaccgagtcggtgcccagtgtcagtctggggagc

SEQ ID NO: 2059 - RNA, 136 nt, synthetic construct
  source 1..136: mol_type = other RNA
gccagacgctccccagagcagttttagagctagaaatagcaagttaaaataaggctagtccgttatcaacttgaaaaagtggcaccgagtcggtgcgacggaggccgggatgccttcgccgctcagtctggggagc

SEQ ID NO: 2060 - RNA, 126 nt, synthetic construct
  source 1..126: mol_type = other RNA
gccagacgctccccagagcagttttagagctagaaatagcaagttaaaataaggctagtccgttatcaacttgaaaaagtggcaccgagtcggtgcggatcgtccctcaggggcagtctggggagc

SEQ ID NO: 2061 - RNA, 116 nt, synthetic construct
  source 1..116: mol_type = other RNA
gccagacgctccccagagcagttttagagctagaaatagcaagttaaaataaggctagtccgttatcaacttgaaaaagtggcaccgagtcggtgcggtgccgcagtctggggagc

SEQ ID NO: 2062 - RNA, 126 nt, synthetic construct
  source 1..126: mol_type = other RNA
gccagacgctccccagagcagttttagagctagaaatagcaagttaaaataaggctagtccgttatcaacttgaaaaagtggcaccgagtcggtgcccttatcatctttaagtttctctggggagc

SEQ ID NO: 2063 - RNA, 131 nt, synthetic construct
  source 1..131: mol_type = other RNA
gccagacgctccccagagcagttttagagctagaaatagcaagttaaaataaggctagtccgttatcaacttgaaaaagtggcaccgagtcggtgcgccgtcgtggaggcaaggcctgcgttctggggagc

SEQ ID NO: 2064 - RNA, 128 nt, synthetic construct
  source 1..128: mol_type = other RNA
gccagacgctccccagagcagttttagagctagaaatagcaagttaaaataaggctagtccgttatcaacttgaaaaagtggcaccgagtcggtgccggtccgcgcgcagcgactttctctggggagc

SEQ ID NO: 2065 - RNA, 124 nt, synthetic construct
  source 1..124: mol_type = other RNA
gccagacgctccccagagcagttttagagctagaaatagcaagttaaaataaggctagtccgttatcaacttgaaaaagtggcaccgagtcggtgcgctacggccggagtgttctctggggagc

SEQ ID NO: 2066 - RNA, 116 nt, synthetic construct
  source 1..116: mol_type = other RNA
gccagacgctccccagagcagttttagagctagaaatagcaagttaaaataaggctagtccgttatcaacttgaaaaagtggcaccgagtcggtgctttccgcttctctggggagc

SEQ ID NO: 2067 - RNA, 121 nt, synthetic construct
  source 1..121: mol_type = other RNA
gccagacgctccccagagcagttttagagctagaaatagcaagttaaaataaggctagtccgttatcaacttgaaaaagtggcaccgagtcggtgccgtgccgcgcgtgtctctggggagc

SEQ ID NO: 2068 - RNA, 141 nt, synthetic construct
  source 1..141: mol_type = other RNA
gccagacgctccccagagcagttttagagctagaaatagcaagttaaaataaggctagtccgttatcaacttgaaaaagtggcaccgagtcggtgctcgagccgcgtgagtcattgtactctacggcggtctctggggagc

SEQ ID NO: 2069 - RNA, 126 nt, synthetic construct
  source 1..126: mol_type = other RNA
gccagacgctccccagagcagttttagagctagaaatagcaagttaaaataaggctagtccgttatcaacttgaaaaagtggcaccgagtcggtgcggactatccctccatggcgttctggggagc

SEQ ID NO: 2070 - RNA, 121 nt, synthetic construct
  source 1..121: mol_type = other RNA
gccagacgctccccagagcagttttagagctagaaatagcaagttaaaataaggctagtccgttatcaacttgaaaaagtggcaccgagtcggtgctgctatgctgggctctctggggagc

SEQ ID NO: 2071 - RNA, 134 nt, synthetic construct
  source 1..134: mol_type = other RNA
gccagacgctccccagagcagttttagagctagaaatagcaagttaaaataaggctagtccgttatcaacttgaaaaagtggcaccgagtcggtgctaggggtcgcctgggtgctcgagggcgttctggggagc

SEQ ID NO: 2072 - RNA, 131 nt, synthetic construct
  source 1..131: mol_type = other RNA
gccagacgctccccagagcagttttagagctagaaatagcaagttaaaataaggctagtccgttatcaacttgaaaaagtggcaccgagtcggtgccggtaatggcactctaaccgccctctctggggagc

SEQ ID NO: 2073 - RNA, 126 nt, synthetic construct
  source 1..126: mol_type = other RNA
gccagacgctccccagagcagttttagagctagaaatagcaagttaaaataaggctagtccgttatcaacttgaaaaagtggcaccgagtcggtgcgcggagacagttcttagatctctggggagc

SEQ ID NO: 2074 - RNA, 121 nt, synthetic construct
  source 1..121: mol_type = other RNA
gccagacgctccccagagcagttttagagctagaaatagcaagttaaaataaggctagtccgttatcaacttgaaaaagtggcaccgagtcggtgcgacgtcgttgtgtgctctggggagc

SEQ ID NO: 2075 - RNA, 134 nt, synthetic construct
  source 1..134: mol_type = other RNA
gccagacgctccccagagcagttttagagctagaaatagcaagttaaaataaggctagtccgttatcaacttgaaaaagtggcaccgagtcggtgcggatgtccattggaccgcgcttcggtgctctggggagc

SEQ ID NO: 2076 - RNA, 134 nt, synthetic construct
  source 1..134: mol_type = other RNA
gccagacgctccccagagcagttttagagctagaaatagcaagttaaaataaggctagtccgttatcaacttgaaaaagtggcaccgagtcggtgccggctacgtcccgggacgtgccccgtgctctggggagc

SEQ ID NO: 2077 - RNA, 121 nt, synthetic construct
  source 1..121: mol_type = other RNA
gccagacgctccccagagcagttttagagctagaaatagcaagttaaaataaggctagtccgttatcaacttgaaaaagtggcaccgagtcggtgctggggtaacgcgcgttctggggagc

SEQ ID NO: 2078 - RNA, 116 nt, synthetic construct
  source 1..116: mol_type = other RNA
gccagacgctccccagagcagttttagagctagaaatagcaagttaaaataaggctagtccgttatcaacttgaaaaagtggcaccgagtcggtgcctagcactgctctggggagc

SEQ ID NO: 2079 - RNA, 121 nt, synthetic construct
  source 1..121: mol_type = other RNA
gccagacgctccccagagcagttttagagctagaaatagcaagttaaaataaggctagtccgttatcaacttgaaaaagtggcaccgagtcggtgccctgagcctcgtggctctggggagc

SEQ ID NO: 2080 - RNA, 116 nt, synthetic construct
  source 1..116: mol_type = other RNA
gccagacgctccccagagcagttttagagctagaaatagcaagttaaaataaggctagtccgttatcaacttgaaaaagtggcaccgagtcggtgcccgcgctggctctggggagc

SEQ ID NO: 2081 - RNA, 136 nt, synthetic construct
  source 1..136: mol_type = other RNA
gccagacgctccccagagcagttttagagctagaaatagcaagttaaaataaggctagtccgttatcaacttgaaaaagtggcaccgagtcggtgctgcaggaggccgtccgccggacgggtgggctctggggagc

SEQ ID NO: 2082 - RNA, 126 nt, synthetic construct
  source 1..126: mol_type = other RNA
gccagacgctccccagagcagttttagagctagaaatagcaagttaaaataaggctagtccgttatcaacttgaaaaagtggcaccgagtcggtgcccgcactcggcccgtggggctctggggagc

SEQ ID NO: 2083 - RNA, 136 nt, synthetic construct
  source 1..136: mol_type = other RNA
gccagacgctccccagagcagttttagagctagaaatagcaagttaaaataaggctagtccgttatcaacttgaaaaagtggcaccgagtcggtgcccggcgccacaggccgtgccgctgcggggctctggggagc

SEQ ID NO: 2084 - RNA, 128 nt, synthetic construct
  source 1..128: mol_type = other RNA
gccagacgctccccagagcagttttagagctagaaatagcaagttaaaataaggctagtccgttatcaacttgaaaaagtggcaccgagtcggtgcgcgagtgccagtcgcccggggctctggggagc

SEQ ID NO: 2085 - RNA, 116 nt, synthetic construct
  source 1..116: mol_type = other RNA
gccagacgctccccagagcagttttagagctagaaatagcaagttaaaataaggctagtccgttatcaacttgaaaaagtggcaccgagtcggtgcttgtaggggctctggggagc

SEQ ID NO: 2086 - RNA, 134 nt, synthetic construct
  source 1..134: mol_type = other RNA
gccagacgctccccagagcagttttagagctagaaatagcaagttaaaataaggctagtccgttatcaacttgaaaaagtggcaccgagtcggtgccgccccgggccggggaggctgagcgggctctggggagc

SEQ ID NO: 2087 - RNA, 121 nt, synthetic construct
  source 1..121: mol_type = other RNA
gccagacgctccccagagcagttttagagctagaaatagcaagttaaaataaggctagtccgttatcaacttgaaaaagtggcaccgagtcggtgccactacggacagggctctggggagc

SEQ ID NO: 2088 - RNA, 134 nt, synthetic construct
  source 1..134: mol_type = other RNA
gccagacgctccccagagcagttttagagctagaaatagcaagttaaaataaggctagtccgttatcaacttgaaaaagtggcaccgagtcggtgcccgggaggtggccgttgttgcgcgccgttctggggagc

SEQ ID NO: 2089 - RNA, 128 nt, synthetic construct
  source 1..128: mol_type = other RNA
gccagacgctccccagagcagttttagagctagaaatagcaagttaaaataaggctagtccgttatcaacttgaaaaagtggcaccgagtcggtgcctcagagcagcactgagtcggctctggggagc

SEQ ID NO: 2090 - RNA, 128 nt, synthetic construct
  source 1..128: mol_type = other RNA
gccagacgctccccagagcagttttagagctagaaatagcaagttaaaataaggctagtccgttatcaacttgaaaaagtggcaccgagtcggtgcccgcgccgcggaggcgggcggctctggggagc

SEQ ID NO: 2091 - RNA, 121 nt, synthetic construct
  source 1..121: mol_type = other RNA
gccagacgctccccagagcagttttagagctagaaatagcaagttaaaataaggctagtccgttatcaacttgaaaaagtggcaccgagtcggtgccgaggccagggcggctctggggagc

SEQ ID NO: 2092 - RNA, 136 nt, synthetic construct
  source 1..136: mol_type = other RNA
gccagacgctccccagagcagttttagagctagaaatagcaagttaaaataaggctagtccgttatcaacttgaaaaagtggcaccgagtcggtgcggccgggcgtcgcggcccggtgcggccggctctggggagc

SEQ ID NO: 2093 - RNA, 126 nt, synthetic construct
  source 1..126: mol_type = other RNA
gccagacgctccccagagcagttttagagctagaaatagcaagttaaaataaggctagtccgttatcaacttgaaaaagtggcaccgagtcggtgctgagataacaaatgtcccgttctggggagc

SEQ ID NO: 2094 - RNA, 124 nt, synthetic construct
  source 1..124: mol_type = other RNA
gccagacgctccccagagcagttttagagctagaaatagcaagttaaaataaggctagtccgttatcaacttgaaaaagtggcaccgagtcggtgcccgcgcggaggttacggctctggggagc

SEQ ID NO: 2095 - RNA, 116 nt, synthetic construct
  source 1..116: mol_type = other RNA
gccagacgctccccagagcagttttagagctagaaatagcaagttaaaataaggctagtccgttatcaacttgaaaaagtggcaccgagtcggtgccagcctaggctctggggagc

SEQ ID NO: 2096 - RNA, 128 nt, synthetic construct
  source 1..128: mol_type = other RNA
gccagacgctccccagagcagttttagagctagaaatagcaagttaaaataaggctagtccgttatcaacttgaaaaagtggcaccgagtcggtgctgacccgggccgcccgcgaggctctggggagc

SEQ ID NO: 2097 - RNA, 126 nt, synthetic construct
  source 1..126: mol_type = other RNA
gccagacgctccccagagcagttttagagctagaaatagcaagttaaaataaggctagtccgttatcaacttgaaaaagtggcaccgagtcggtgctcggtgaggcccggccaggctctggggagc

SEQ ID NO: 2098 - RNA, 136 nt, synthetic construct
  source 1..136: mol_type = other RNA
gccagacgctccccagagcagttttagagctagaaatagcaagttaaaataaggctagtccgttatcaacttgaaaaagtggcaccgagtcggtgcctggacgaggtcgtggcggtcgagtaaggctctggggagc

SEQ ID NO: 2099 - RNA, 141 nt, synthetic construct
  source 1..141: mol_type = other RNA
gccagacgctccccagagcagttttagagctagaaatagcaagttaaaataaggctagtccgttatcaacttgaaaaagtggcaccgagtcggtgcagtcctcagtaccccgagccgtgacgtcggttcgctctggggagc

SEQ ID NO: 2100 - RNA, 134 nt, synthetic construct
  source 1..134: mol_type = other RNA
gccagacgctccccagagcagttttagagctagaaatagcaagttaaaataaggctagtccgttatcaacttgaaaaagtggcaccgagtcggtgcggccggccctgcctccgctccggtgcgctctggggagc

SEQ ID NO: 2101 - RNA, 141 nt, synthetic construct
  source 1..141: mol_type = other RNA
gccagacgctccccagagcagttttagagctagaaatagcaagttaaaataaggctagtccgttatcaacttgaaaaagtggcaccgagtcggtgcgctctcttggcagcggcttccccacttctgggcgctctggggagc

SEQ ID NO: 2102 - RNA, 146 nt, synthetic construct
  source 1..146: mol_type = other RNA
gccagacgctccccagagcagttttagagctagaaatagcaagttaaaataaggctagtccgttatcaacttgaaaaagtggcaccgagtcggtgcccgcgcgggcacggccgggccgcgcctggcgcgccggcgctctggggagc

SEQ ID NO: 2103 - RNA, 128 nt, synthetic construct
  source 1..128: mol_type = other RNA
gccagacgctccccagagcagttttagagctagaaatagcaagttaaaataaggctagtccgttatcaacttgaaaaagtggcaccgagtcggtgcacgggcgcggccgcaacggcgctctggggagc

SEQ ID NO: 2104 - RNA, 136 nt, synthetic construct
  source 1..136: mol_type = other RNA
gccagacgctccccagagcagttttagagctagaaatagcaagttaaaataaggctagtccgttatcaacttgaaaaagtggcaccgagtcggtgcctatcatgcatggcgatcccaggttcgcgctctggggagc

SEQ ID NO: 2105 - RNA, 124 nt, synthetic construct
  source 1..124: mol_type = other RNA
gccagacgctccccagagcagttttagagctagaaatagcaagttaaaataaggctagtccgttatcaacttgaaaaagtggcaccgagtcggtgcgaggttcccacccgtagttctggggagc

SEQ ID NO: 2106 - RNA, 146 nt, synthetic construct
  source 1..146: mol_type = other RNA
gccagacgctccccagagcagttttagagctagaaatagcaagttaaaataaggctagtccgttatcaacttgaaaaagtggcaccgagtcggtgccgccccagcccgcgccggcccgcgcccaatgcccgcgcgctctggggagc

SEQ ID NO: 2107 - RNA, 128 nt, synthetic construct
  source 1..128: mol_type = other RNA
gccagacgctccccagagcagttttagagctagaaatagcaagttaaaataaggctagtccgttatcaacttgaaaaagtggcaccgagtcggtgctggcggactcggtccgtatagttctggggagc

SEQ ID NO: 2108 - RNA, 124 nt, synthetic construct
  source 1..124: mol_type = other RNA
gccagacgctccccagagcagttttagagctagaaatagcaagttaaaataaggctagtccgttatcaacttgaaaaagtggcaccgagtcggtgccagccccgggacggccgctctggggagc

SEQ ID NO: 2109 - RNA, 146 nt, synthetic construct
  source 1..146: mol_type = other RNA
gccagacgctccccagagcagttttagagctagaaatagcaagttaaaataaggctagtccgttatcaacttgaaaaagtggcaccgagtcggtgcccgcgaggctcgtcgcgctgccaaactcgccgggccccgctctggggagc

SEQ ID NO: 2110 - RNA, 128 nt, synthetic construct
  source 1..128: mol_type = other RNA
gccagacgctccccagagcagttttagagctagaaatagcaagttaaaataaggctagtccgttatcaacttgaaaaagtggcaccgagtcggtgcttgatgtcgtaggtgataccgctctggggagc

SEQ ID NO: 2111 - RNA, 121 nt, synthetic construct
  source 1..121: mol_type = other RNA
gccagacgctccccagagcagttttagagctagaaatagcaagttaaaataaggctagtccgttatcaacttgaaaaagtggcaccgagtcggtgcgcctccgcccaccgctctggggagc

SEQ ID NO: 2112 - RNA, 131 nt, synthetic construct
  source 1..131: mol_type = other RNA
gccagacgctccccagagcagttttagagctagaaatagcaagttaaaataaggctagtccgttatcaacttgaaaaagtggcaccgagtcggtgccgcgtccgctgccggcgggcgacgctctggggagc

SEQ ID NO: 2113 - RNA, 124 nt, synthetic construct
  source 1..124: mol_type = other RNA
gccagacgctccccagagcagttttagagctagaaatagcaagttaaaataaggctagtccgttatcaacttgaaaaagtggcaccgagtcggtgcgcagataatcgatagagttctggggagc

SEQ ID NO: 2114 - RNA, 128 nt, synthetic construct
  source 1..128: mol_type = other RNA
gccagacgctccccagagcagttttagagctagaaatagcaagttaaaataaggctagtccgttatcaacttgaaaaagtggcaccgagtcggtgcattgctcaggcgaacccgtagctctggggagc

SEQ ID NO: 2115 - RNA, 124 nt, synthetic construct
  source 1..124: mol_type = other RNA
gccagacgctccccagagcagttttagagctagaaatagcaagttaaaataaggctagtccgttatcaacttgaaaaagtggcaccgagtcggtgcgggcggccactggggagctctggggagc

SEQ ID NO: 2116 - RNA, 126 nt, synthetic construct
  source 1..126: mol_type = other RNA
gccagacgctccccagagcagttttagagctagaaatagcaagttaaaataaggctagtccgttatcaacttgaaaaagtggcaccgagtcggtgccgcgccggccgtcgcccagctctggggagc

SEQ ID NO: 2117 - RNA, 134 nt, synthetic construct
  source 1..134: mol_type = other RNA
gccagacgctccccagagcagttttagagctagaaatagcaagttaaaataaggctagtccgttatcaacttgaaaaagtggcaccgagtcggtgcgacggcccgcgtgactgcgacccacagctctggggagc

SEQ ID NO: 2118 - RNA, 121 nt, synthetic construct
  source 1..121: mol_type = other RNA
gccagacgctccccagagcagttttagagctagaaatagcaagttaaaataaggctagtccgttatcaacttgaaaaagtggcaccgagtcggtgcgcggcaagaatgtcctctggggagc

SEQ ID NO: 2119 - RNA, 128 nt, synthetic construct
  source 1..128: mol_type = other RNA
gccagacgctccccagagcagttttagagctagaaatagcaagttaaaataaggctagtccgttatcaacttgaaaaagtggcaccgagtcggtgcatctcgccacggacactggtcctctggggagc

SEQ ID NO: 2120 - RNA, 124 nt, synthetic construct
  source 1..124: mol_type = other RNA
gccagacgctccccagagcagttttagagctagaaatagcaagttaaaataaggctagtccgttatcaacttgaaaaagtggcaccgagtcggtgctacccggcgtccgcgtcctctggggagc

SEQ ID NO: 2121 - RNA, 134 nt, synthetic construct
  source 1..134: mol_type = other RNA
gccagacgctccccagagcagttttagagctagaaatagcaagttaaaataaggctagtccgttatcaacttgaaaaagtggcaccgagtcggtgcctcccctcgtatcgagcgtgatctctcctctggggagc

SEQ ID NO: 2122 - RNA, 141 nt, synthetic construct
  source 1..141: mol_type = other RNA
gccagacgctccccagagcagttttagagctagaaatagcaagttaaaataaggctagtccgttatcaacttgaaaaagtggcaccgagtcggtgcgcatcggacgctgcgacggcgccggccccggcagttctggggagc

SEQ ID NO: 2123 - RNA, 136 nt, synthetic construct
  source 1..136: mol_type = other RNA
gccagacgctccccagagcagttttagagctagaaatagcaagttaaaataaggctagtccgttatcaacttgaaaaagtggcaccgagtcggtgcaccccacgtatcagcaaagtgcaacccttttctggggagc

SEQ ID NO: 2124 - RNA, 144 nt, synthetic construct
  source 1..144: mol_type = other RNA
gccagacgctccccagagcagttttagagctagaaatagcaagttaaaataaggctagtccgttatcaacttgaaaaagtggcaccgagtcggtgctgcatgatggtccgatgctgcctgcctcggcctcatcctctggggagc

SEQ ID NO: 2125 - RNA, 141 nt, synthetic construct
  source 1..141: mol_type = other RNA
gccagacgctccccagagcagttttagagctagaaatagcaagttaaaataaggctagtccgttatcaacttgaaaaagtggcaccgagtcggtgctgatttgtgacgggtaaacagataattagccatcctctggggagc

SEQ ID NO: 2126 - RNA, 131 nt, synthetic construct
  source 1..131: mol_type = other RNA
gccagacgctccccagagcagttttagagctagaaatagcaagttaaaataaggctagtccgttatcaacttgaaaaagtggcaccgagtcggtgcgccgccccggggacgtcccgttgcctctggggagc

SEQ ID NO: 2127 - RNA, 121 nt, synthetic construct
  source 1..121: mol_type = other RNA
gccagacgctccccagagcagttttagagctagaaatagcaagttaaaataaggctagtccgttatcaacttgaaaaagtggcaccgagtcggtgcgtatggttaattgcctctggggagc

SEQ ID NO: 2128 - RNA, 136 nt, synthetic construct
  source 1..136: mol_type = other RNA
gccagacgctccccagagcagttttagagctagaaatagcaagttaaaataaggctagtccgttatcaacttgaaaaagtggcaccgagtcggtgcggcgccggcctgggagcccgggcctgggcctctggggagc

SEQ ID NO: 2129 - RNA, 131 nt, synthetic construct
  source 1..131: mol_type = other RNA
gccagacgctccccagagcagttttagagctagaaatagcaagttaaaataaggctagtccgttatcaacttgaaaaagtggcaccgagtcggtgccactgcaccgcttcggtctgcggcctctggggagc

SEQ ID NO: 2130 - RNA, 126 nt, synthetic construct
  source 1..126: mol_type = other RNA
gccagacgctccccagagcagttttagagctagaaatagcaagttaaaataaggctagtccgttatcaacttgaaaaagtggcaccgagtcggtgcccccgccgccccgtccggcctctggggagc

SEQ ID NO: 2131 - RNA, 124 nt, synthetic construct
  source 1..124: mol_type = other RNA
gccagacgctccccagagcagttttagagctagaaatagcaagttaaaataaggctagtccgttatcaacttgaaaaagtggcaccgagtcggtgcaggcctggcgtccaggcctctggggagc

SEQ ID NO: 2132 - RNA, 126 nt, synthetic construct
  source 1..126: mol_type = other RNA
gccagacgctccccagagcagttttagagctagaaatagcaagttaaaataaggctagtccgttatcaacttgaaaaagtggcaccgagtcggtgcctcgtcactggatgtgaagttctggggagc

SEQ ID NO: 2133 - RNA, 134 nt, synthetic construct
  source 1..134: mol_type = other RNA
gccagacgctccccagagcagttttagagctagaaatagcaagttaaaataaggctagtccgttatcaacttgaaaaagtggcaccgagtcggtgctgctgcccgccgcccgtagccacaggcctctggggagc

SEQ ID NO: 2134 - RNA, 131 nt, synthetic construct
  source 1..131: mol_type = other RNA
gccagacgctccccagagcagttttagagctagaaatagcaagttaaaataaggctagtccgttatcaacttgaaaaagtggcaccgagtcggtgccccggggccttggggctgcctcgcctctggggagc

SEQ ID NO: 2135 - RNA, 128 nt, synthetic construct
  source 1..128: mol_type = other RNA
gccagacgctccccagagcagttttagagctagaaatagcaagttaaaataaggctagtccgttatcaacttgaaaaagtggcaccgagtcggtgcccgatcccggcccgcccgcgcctctggggagc

SEQ ID NO: 2136 - RNA, 141 nt, synthetic construct
  source 1..141: mol_type = other RNA
gccagacgctccccagagcagttttagagctagaaatagcaagttaaaataaggctagtccgttatcaacttgaaaaagtggcaccgagtcggtgccgccaccgggttctccggtacctgcggcttggccctctggggagc

SEQ ID NO: 2137 - RNA, 126 nt, synthetic construct
  source 1..126: mol_type = other RNA
gccagacgctccccagagcagttttagagctagaaatagcaagttaaaataaggctagtccgttatcaacttgaaaaagtggcaccgagtcggtgccacggccgggccgccgctcttctggggagc

SEQ ID NO: 2138 - RNA, 116 nt, synthetic construct
  source 1..116: mol_type = other RNA
gccagacgctccccagagcagttttagagctagaaatagcaagttaaaataaggctagtccgttatcaacttgaaaaagtggcaccgagtcggtgcagctaggccctctggggagc

SEQ ID NO: 2139 - RNA, 126 nt, synthetic construct
  source 1..126: mol_type = other RNA
gccagacgctccccagagcagttttagagctagaaatagcaagttaaaataaggctagtccgttatcaacttgaaaaagtggcaccgagtcggtgccgtcgatgggtccgacgccctctggggagc

SEQ ID NO: 2140 - RNA, 128 nt, synthetic construct
  source 1..128: mol_type = other RNA
gccagacgctccccagagcagttttagagctagaaatagcaagttaaaataaggctagtccgttatcaacttgaaaaagtggcaccgagtcggtgcccggcccctgaggccgggcccctctggggagc

SEQ ID NO: 2141 - RNA, 134 nt, synthetic construct
  source 1..134: mol_type = other RNA
gccagacgctccccagagcagttttagagctagaaatagcaagttaaaataaggctagtccgttatcaacttgaaaaagtggcaccgagtcggtgccgcgggagccggccgccggcgccgcccctctggggagc

SEQ ID NO: 2142 - RNA, 129 nt, synthetic construct
  source 1..129: mol_type = other RNA
gccagacgctccccagagcagttttagagctagaaatagcaagttaaaataaggctagtccgttatcaacttgaaaaagtggcaccgagtcggtgctcgtggtctcgggcatcagaccctctggggagc

SEQ ID NO: 2143 - RNA, 136 nt, synthetic construct
  source 1..136: mol_type = other RNA
gccagacgctccccagagcagttttagagctagaaatagcaagttaaaataaggctagtccgttatcaacttgaaaaagtggcaccgagtcggtgcgtgtctcatgtttccttgtattacgttacctctggggagc

SEQ ID NO: 2144 - RNA, 136 nt, synthetic construct
  source 1..136: mol_type = other RNA
gccagacgctccccagagcagttttagagctagaaatagcaagttaaaataaggctagtccgttatcaacttgaaaaagtggcaccgagtcggtgcagtgtttaccttatctgcttacgtagtacctctggggagc

SEQ ID NO: 2145 - RNA, 141 nt, synthetic construct
  source 1..141: mol_type = other RNA
gccagacgctccccagagcagttttagagctagaaatagcaagttaaaataaggctagtccgttatcaacttgaaaaagtggcaccgagtcggtgcgatatgatactgaacgcccctagtgccaatggacctctggggagc

SEQ ID NO: 2146 - RNA, 146 nt, synthetic construct
  source 1..146: mol_type = other RNA
gccagacgctccccagagcagttttagagctagaaatagcaagttaaaataaggctagtccgttatcaacttgaaaaagtggcaccgagtcggtgcgcggccttaagttcgctctcaccccgtcgtcaccaggacctctggggagc

SEQ ID NO: 2147 - RNA, 141 nt, synthetic construct
  source 1..141: mol_type = other RNA
gccagacgctccccagagcagttttagagctagaaatagcaagttaaaataaggctagtccgttatcaacttgaaaaagtggcaccgagtcggtgcccggggaacggcttccccggcggcccggctcgtactctggggagc

SEQ ID NO: 2148 - RNA, 116 nt, synthetic construct
  source 1..116: mol_type = other RNA
gccagacgctccccagagcagttttagagctagaaatagcaagttaaaataaggctagtccgttatcaacttgaaaaagtggcaccgagtcggtgcgaagccgtactctggggagc

SEQ ID NO: 2149 - RNA, 126 nt, synthetic construct
  source 1..126: mol_type = other RNA
gccagacgctccccagagcagttttagagctagaaatagcaagttaaaataaggctagtccgttatcaacttgaaaaagtggcaccgagtcggtgctatatgcattaccccgatactctggggagc

SEQ ID NO: 2150 - RNA, 121 nt, synthetic construct
  source 1..121: mol_type = other RNA
gccagacgctccccagagcagttttagagctagaaatagcaagttaaaataaggctagtccgttatcaacttgaaaaagtggcaccgagtcggtgcaggcgcgtaggtgactctggggagc

SEQ ID NO: 2151 - RNA, 131 nt, synthetic construct
  source 1..131: mol_type = other RNA
gccagacgctccccagagcagttttagagctagaaatagcaagttaaaataaggctagtccgttatcaacttgaaaaagtggcaccgagtcggtgcggaggctcgcaccgaaatcagcgactctggggagc

SEQ ID NO: 2152 - RNA, 141 nt, synthetic construct
  source 1..141: mol_type = other RNA
gccagacgctccccagagcagttttagagctagaaatagcaagttaaaataaggctagtccgttatcaacttgaaaaagtggcaccgagtcggtgctcggcgccccgggcgtggccggcgtgcaggccgactctggggagc

SEQ ID NO: 2153 - RNA, 134 nt, synthetic construct
  source 1..134: mol_type = other RNA
gccagacgctccccagagcagttttagagctagaaatagcaagttaaaataaggctagtccgttatcaacttgaaaaagtggcaccgagtcggtgccccgtgccctcggtcacgccgacttcactctggggagc

SEQ ID NO: 2154 - RNA, 136 nt, synthetic construct
  source 1..136: mol_type = other RNA
gccagacgctccccagagcagttttagagctagaaatagcaagttaaaataaggctagtccgttatcaacttgaaaaagtggcaccgagtcggtgccgggaggctggggcgcggggcccggcgcactctggggagc

SEQ ID NO: 2155 - RNA, 131 nt, synthetic construct
  source 1..131: mol_type = other RNA
gccagacgctccccagagcagttttagagctagaaatagcaagttaaaataaggctagtccgttatcaacttgaaaaagtggcaccgagtcggtgcgggccgtgggagcctccgtcaccactctggggagc

SEQ ID NO: 2156 - RNA, 121 nt, synthetic construct
  source 1..121: mol_type = other RNA
gccagacgctccccagagcagttttagagctagaaatagcaagttaaaataaggctagtccgttatcaacttgaaaaagtggcaccgagtcggtgcagctacttgtgtaactctggggagc

SEQ ID NO: 2157 - RNA, 128 nt, synthetic construct
  source 1..128: mol_type = other RNA
gccagacgctccccagagcagttttagagctagaaatagcaagttaaaataaggctagtccgttatcaacttgaaaaagtggcaccgagtcggtgccccgtaacgcccacccgcgaactctggggagc

SEQ ID NO: 2158 - RNA, 128 nt, synthetic construct
  source 1..128: mol_type = other RNA
gccagacgctccccagagcagttttagagctagaaatagcaagttaaaataaggctagtccgttatcaacttgaaaaagtggcaccgagtcggtgcatgagtccaggccatgtgaaactctggggagc

SEQ ID NO: 2159 - RNA, 136 nt, synthetic construct
  source 1..136: mol_type = other RNA
gccagacgctccccagagcagttttagagctagaaatagcaagttaaaataaggctagtccgttatcaacttgaaaaagtggcaccgagtcggtgcgatttgataatctcgtatatagagcagttatctggggagc

SEQ ID NO: 2160 - RNA, 124 nt, synthetic construct
  source 1..124: mol_type = other RNA
gccagacgctccccagagcagttttagagctagaaatagcaagttaaaataaggctagtccgttatcaacttgaaaaagtggcaccgagtcggtgcaaagtctcatttgacttatctggggagc

SEQ ID NO: 2161 - RNA, 124 nt, synthetic construct
  source 1..124: mol_type = other RNA
gccagacgctccccagagcagttttagagctagaaatagcaagttaaaataaggctagtccgttatcaacttgaaaaagtggcaccgagtcggtgccgccggagcggccgggtatctggggagc

SEQ ID NO: 2162 - RNA, 146 nt, synthetic construct
  source 1..146: mol_type = other RNA
gccagacgctccccagagcagttttagagctagaaatagcaagttaaaataaggctagtccgttatcaacttgaaaaagtggcaccgagtcggtgcttccatagctaacgtatttggtaattacattcaagaagtatctggggagc

SEQ ID NO: 2163 - RNA, 141 nt, synthetic construct
  source 1..141: mol_type = other RNA
gccagacgctccccagagcagttttagagctagaaatagcaagttaaaataaggctagtccgttatcaacttgaaaaagtggcaccgagtcggtgcagcttgagatgacagtgatctcggaaattgatctatctggggagc

SEQ ID NO: 2164 - RNA, 134 nt, synthetic construct
  source 1..134: mol_type = other RNA
gccagacgctccccagagcagttttagagctagaaatagcaagttaaaataaggctagtccgttatcaacttgaaaaagtggcaccgagtcggtgcctagaatgacttatgcgatagagtgctatctggggagc

SEQ ID NO: 2165 - RNA, 134 nt, synthetic construct
  source 1..134: mol_type = other RNA
gccagacgctccccagagcagttttagagctagaaatagcaagttaaaataaggctagtccgttatcaacttgaaaaagtggcaccgagtcggtgccgcccaggtccaataggtgaaatatgcttctggggagc

SEQ ID NO: 2166 - RNA, 128 nt, synthetic construct
  source 1..128: mol_type = other RNA
gccagacgctccccagagcagttttagagctagaaatagcaagttaaaataaggctagtccgttatcaacttgaaaaagtggcaccgagtcggtgctgtgcaacttcattgttagatatctggggagc

SEQ ID NO: 2167 - RNA, 141 nt, synthetic construct
  source 1..141: mol_type = other RNA
gccagacgctccccagagcagttttagagctagaaatagcaagttaaaataaggctagtccgttatcaacttgaaaaagtggcaccgagtcggtgcgataatctttaacaacgtgaagaattcatgtttgatctggggagc

SEQ ID NO: 2168 - RNA, 136 nt, synthetic construct
  source 1..136: mol_type = other RNA
gccagacgctccccagagcagttttagagctagaaatagcaagttaaaataaggctagtccgttatcaacttgaaaaagtggcaccgagtcggtgcggattccggtacccgcggggtggccttggatctggggagc

SEQ ID NO: 2169 - RNA, 141 nt, synthetic construct
  source 1..141: mol_type = other RNA
gccagacgctccccagagcagttttagagctagaaatagcaagttaaaataaggctagtccgttatcaacttgaaaaagtggcaccgagtcggtgccgttctggcgagccgcgcggcgtgccgggaggggatctggggagc

SEQ ID NO: 2170 - RNA, 146 nt, synthetic construct
  source 1..146: mol_type = other RNA
gccagacgctccccagagcagttttagagctagaaatagcaagttaaaataaggctagtccgttatcaacttgaaaaagtggcaccgagtcggtgcgcacatgtccacgccagcagcgccaggtggcggacagggatctggggagc

SEQ ID NO: 2171 - RNA, 128 nt, synthetic construct
  source 1..128: mol_type = other RNA
gccagacgctccccagagcagttttagagctagaaatagcaagttaaaataaggctagtccgttatcaacttgaaaaagtggcaccgagtcggtgccgtgggtcgtccgctgttaggatctggggagc

SEQ ID NO: 2172 - RNA, 136 nt, synthetic construct
  source 1..136: mol_type = other RNA
gccagacgctccccagagcagttttagagctagaaatagcaagttaaaataaggctagtccgttatcaacttgaaaaagtggcaccgagtcggtgcccggctcgcaggctgggccgataccgtcgatctggggagc

SEQ ID NO: 2173 - RNA, 126 nt, synthetic construct
  source 1..126: mol_type = other RNA
gccagacgctccccagagcagttttagagctagaaatagcaagttaaaataaggctagtccgttatcaacttgaaaaagtggcaccgagtcggtgcccgaggtctagggtgtccgatctggggagc

SEQ ID NO: 2174 - RNA, 124 nt, synthetic construct
  source 1..124: mol_type = other RNA
gccagacgctccccagagcagttttagagctagaaatagcaagttaaaataaggctagtccgttatcaacttgaaaaagtggcaccgagtcggtgcgcgtgtaacgcgcgggcttctggggagc

SEQ ID NO: 2175 - RNA, 124 nt, synthetic construct
  source 1..124: mol_type = other RNA
gccagacgctccccagagcagttttagagctagaaatagcaagttaaaataaggctagtccgttatcaacttgaaaaagtggcaccgagtcggtgcaggcggaagaccggccgatctggggagc

SEQ ID NO: 2176 - RNA, 131 nt, synthetic construct
  source 1..131: mol_type = other RNA
gccagacgctccccagagcagttttagagctagaaatagcaagttaaaataaggctagtccgttatcaacttgaaaaagtggcaccgagtcggtgccccggcgcctgagcccggccgccgatctggggagc

SEQ ID NO: 2177 - RNA, 121 nt, synthetic construct
  source 1..121: mol_type = other RNA
gccagacgctccccagagcagttttagagctagaaatagcaagttaaaataaggctagtccgttatcaacttgaaaaagtggcaccgagtcggtgcgcggattgaacacgatctggggagc

SEQ ID NO: 2178 - RNA, 134 nt, synthetic construct
  source 1..134: mol_type = other RNA
gccagacgctccccagagcagttttagagctagaaatagcaagttaaaataaggctagtccgttatcaacttgaaaaagtggcaccgagtcggtgctatagtgtgttgattccatcgttgcagatctggggagc

SEQ ID NO: 2179 - RNA, 124 nt, synthetic construct
  source 1..124: mol_type = other RNA
gccagacgctccccagagcagttttagagctagaaatagcaagttaaaataaggctagtccgttatcaacttgaaaaagtggcaccgagtcggtgcacccaagaggagggcagatctggggagc

SEQ ID NO: 2180 - RNA, 131 nt, synthetic construct
  source 1..131: mol_type = other RNA
gccagacgctccccagagcagttttagagctagaaatagcaagttaaaataaggctagtccgttatcaacttgaaaaagtggcaccgagtcggtgcaagctcctcaattccattcacaagatctggggagc

SEQ ID NO: 2181 - RNA, 128 nt, synthetic construct
  source 1..128: mol_type = other RNA
gccagacgctccccagagcagttttagagctagaaatagcaagttaaaataaggctagtccgttatcaacttgaaaaagtggcaccgagtcggtgcccaccgcggcccggggcaggcttctggggagc

SEQ ID NO: 2182 - RNA, 131 nt, synthetic construct
  source 1..131: mol_type = other RNA
gccagacgctccccagagcagttttagagctagaaatagcaagttaaaataaggctagtccgttatcaacttgaaaaagtggcaccgagtcggtgcgaaagtaattacaccttacctatcatctggggagc

SEQ ID NO: 2183 - RNA, 126 nt, synthetic construct
  source 1..126: mol_type = other RNA
gccagacgctccccagagcagttttagagctagaaatagcaagttaaaataaggctagtccgttatcaacttgaaaaagtggcaccgagtcggtgcgcctgagattcgaagccgcttctggggagc

SEQ ID NO: 2184 - RNA, 121 nt, synthetic construct
  source 1..121: mol_type = other RNA
gccagacgctccccagagcagttttagagctagaaatagcaagttaaaataaggctagtccgttatcaacttgaaaaagtggcaccgagtcggtgctcggccccgcgtgcatctggggagc

SEQ ID NO: 2185 - RNA, 131 nt, synthetic construct
  source 1..131: mol_type = other RNA
gccagacgctccccagagcagttttagagctagaaatagcaagttaaaataaggctagtccgttatcaacttgaaaaagtggcaccgagtcggtgccgtagggcttcagtgtacccgtgcatctggggagc

SEQ ID NO: 2186 - RNA, 121 nt, synthetic construct
  source 1..121: mol_type = other RNA
gccagacgctccccagagcagttttagagctagaaatagcaagttaaaataaggctagtccgttatcaacttgaaaaagtggcaccgagtcggtgcagccgccgtgcggcatctggggagc

SEQ ID NO: 2187 - RNA, 126 nt, synthetic construct
  source 1..126: mol_type = other RNA
gccagacgctccccagagcagttttagagctagaaatagcaagttaaaataaggctagtccgttatcaacttgaaaaagtggcaccgagtcggtgccctatacacggccgcccgcatctggggagc

SEQ ID NO: 2188 - RNA, 121 nt, synthetic construct
  source 1..121: mol_type = other RNA
gccagacgctccccagagcagttttagagctagaaatagcaagttaaaataaggctagtccgttatcaacttgaaaaagtggcaccgagtcggtgccctcggtgacccgcatctggggagc

SEQ ID NO: 2189 - RNA, 116 nt, synthetic construct
  source 1..116: mol_type = other RNA
gccagacgctccccagagcagttttagagctagaaatagcaagttaaaataaggctagtccgttatcaacttgaaaaagtggcaccgagtcggtgcggtccccgcttctggggagc

SEQ ID NO: 2190 - RNA, 131 nt, synthetic construct
  source 1..131: mol_type = other RNA
gccagacgctccccagagcagttttagagctagaaatagcaagttaaaataaggctagtccgttatcaacttgaaaaagtggcaccgagtcggtgcgtgtggagctatctaggaatacgcatctggggagc

SEQ ID NO: 2191 - RNA, 128 nt, synthetic construct
  source 1..128: mol_type = other RNA
gccagacgctccccagagcagttttagagctagaaatagcaagttaaaataaggctagtccgttatcaacttgaaaaagtggcaccgagtcggtgcgccccacgccacggcatttccatctggggagc

SEQ ID NO: 2192 - RNA, 136 nt, synthetic construct
  source 1..136: mol_type = other RNA
gccagacgctccccagagcagttttagagctagaaatagcaagttaaaataaggctagtccgttatcaacttgaaaaagtggcaccgagtcggtgcgcgagctagggccaagcctgtggcggtccatctggggagc

SEQ ID NO: 2193 - RNA, 124 nt, synthetic construct
  source 1..124: mol_type = other RNA
gccagacgctccccagagcagttttagagctagaaatagcaagttaaaataaggctagtccgttatcaacttgaaaaagtggcaccgagtcggtgcgacgacataagtaccccatctggggagc

SEQ ID NO: 2194 - RNA, 126 nt, synthetic construct
  source 1..126: mol_type = other RNA
gccagacgctccccagagcagttttagagctagaaatagcaagttaaaataaggctagtccgttatcaacttgaaaaagtggcaccgagtcggtgccccggaatccggccgtaccatctggggagc

SEQ ID NO: 2195 - RNA, 131 nt, synthetic construct
  source 1..131: mol_type = other RNA
gccagacgctccccagagcagttttagagctagaaatagcaagttaaaataaggctagtccgttatcaacttgaaaaagtggcaccgagtcggtgcccgaggccgaaaccggaaactaccatctggggagc

SEQ ID NO: 2196 - RNA, 116 nt, synthetic construct
  source 1..116: mol_type = other RNA
gccagacgctccccagagcagttttagagctagaaatagcaagttaaaataaggctagtccgttatcaacttgaaaaagtggcaccgagtcggtgcccggcggacatctggggagc

SEQ ID NO: 2197 - RNA, 126 nt, synthetic construct
  source 1..126: mol_type = other RNA
gccagacgctccccagagcagttttagagctagaaatagcaagttaaaataaggctagtccgttatcaacttgaaaaagtggcaccgagtcggtgcgtgccggagcgcgggccacatctggggagc

SEQ ID NO: 2198 - RNA, 141 nt, synthetic construct
  source 1..141: mol_type = other RNA
gccagacgctccccagagcagttttagagctagaaatagcaagttaaaataaggctagtccgttatcaacttgaaaaagtggcaccgagtcggtgcacgtgcgcgctcaatactcaatgtaacgtcccacatctggggagc

SEQ ID NO: 2199 - RNA, 141 nt, synthetic construct
  source 1..141: mol_type = other RNA
gccagacgctccccagagcagttttagagctagaaatagcaagttaaaataaggctagtccgttatcaacttgaaaaagtggcaccgagtcggtgctggtgacagcaccaggtcatggcgttaagtcaacatctggggagc

SEQ ID NO: 2200 - RNA, 131 nt, synthetic construct
  source 1..131: mol_type = other RNA
gccagacgctccccagagcagttttagagctagaaatagcaagttaaaataaggctagtccgttatcaacttgaaaaagtggcaccgagtcggtgcccttaagcgttattgtcccctttaatctggggagc

SEQ ID NO: 2201 - RNA, 134 nt, synthetic construct
  source 1..134: mol_type = other RNA
gccagacgctccccagagcagttttagagctagaaatagcaagttaaaataaggctagtccgttatcaacttgaaaaagtggcaccgagtcggtgcctaagatgtagcccttggtaataggtaatctggggagc

SEQ ID NO: 2202 - RNA, 144 nt, synthetic construct
  source 1..144: mol_type = other RNA
gccagacgctccccagagcagttttagagctagaaatagcaagttaaaataaggctagtccgttatcaacttgaaaaagtggcaccgagtcggtgcttgccgcacgccgagccttctctacgggcccgggcgaatctggggagc

SEQ ID NO: 2203 - RNA, 124 nt, synthetic construct
  source 1..124: mol_type = other RNA
gccagacgctccccagagcagttttagagctagaaatagcaagttaaaataaggctagtccgttatcaacttgaaaaagtggcaccgagtcggtgctcagaaaccggcgtagaatctggggagc

SEQ ID NO: 2204 - RNA, 141 nt, synthetic construct
  source 1..141: mol_type = other RNA
gccagacgctccccagagcagttttagagctagaaatagcaagttaaaataaggctagtccgttatcaacttgaaaaagtggcaccgagtcggtgctatcagcggtacccttaacaaagtctctttgagaatctggggagc

SEQ ID NO: 2205 - RNA, 131 nt, synthetic construct
  source 1..131: mol_type = other RNA
gccagacgctccccagagcagttttagagctagaaatagcaagttaaaataaggctagtccgttatcaacttgaaaaagtggcaccgagtcggtgccgggccgcacccgacaccaccgcaatctggggagc

SEQ ID NO: 2206 - RNA, 124 nt, synthetic construct
  source 1..124: mol_type = other RNA
gccagacgctccccagagcagttttagagctagaaatagcaagttaaaataaggctagtccgttatcaacttgaaaaagtggcaccgagtcggtgcgtacatggcagagagcaatctggggagc

SEQ ID NO: 2207 - RNA, 128 nt, synthetic construct
  source 1..128: mol_type = other RNA
gccagacgctccccagagcagttttagagctagaaatagcaagttaaaataaggctagtccgttatcaacttgaaaaagtggcaccgagtcggtgctcatacacagagcaaactccaatctggggagc

SEQ ID NO: 2208 - RNA, 126 nt, synthetic construct
  source 1..126: mol_type = other RNA
gccagacgctccccagagcagttttagagctagaaatagcaagttaaaataaggctagtccgttatcaacttgaaaaagtggcaccgagtcggtgcacagcaccatctagtgtaaatctggggagc

SEQ ID NO: 2209 - RNA, 134 nt, synthetic construct
  source 1..134: mol_type = other RNA
gccagacgctccccagagcagttttagagctagaaatagcaagttaaaataaggctagtccgttatcaacttgaaaaagtggcaccgagtcggtgcccgcccgtcgtggaggcgggctgcagcttctggggagc

SEQ ID NO: 2210 - RNA, 128 nt, synthetic construct
  source 1..128: mol_type = other RNA
gccagacgctccccagagcagttttagagctagaaatagcaagttaaaataaggctagtccgttatcaacttgaaaaagtggcaccgagtcggtgctgcccgatctgcgcgccggaaatctggggagc

SEQ ID NO: 2211 - RNA, 128 nt, synthetic construct
  source 1..128: mol_type = other RNA
gccagacgctccccagagcagttttagagctagaaatagcaagttaaaataaggctagtccgttatcaacttgaaaaagtggcaccgagtcggtgctcttctagcacttgatgttccttctggggagc

SEQ ID NO: 2212 - RNA, 121 nt, synthetic construct
  source 1..121: mol_type = other RNA
gccagacgctccccagagcagttttagagctagaaatagcaagttaaaataaggctagtccgttatcaacttgaaaaagtggcaccgagtcggtgccaaatcgatgatccttctggggagc

SEQ ID NO: 2213 - RNA, 136 nt, synthetic construct
  source 1..136: mol_type = other RNA
gccagacgctccccagagcagttttagagctagaaatagcaagttaaaataaggctagtccgttatcaacttgaaaaagtggcaccgagtcggtgcccatatcaatcggggcccaggcggtgtctttctggggagc

SEQ ID NO: 2214 - RNA, 128 nt, synthetic construct
  source 1..128: mol_type = other RNA
gccagacgctccccagagcagttttagagctagaaatagcaagttaaaataaggctagtccgttatcaacttgaaaaagtggcaccgagtcggtgcgggtcgttattctacccatccttctggggagc

SEQ ID NO: 2215 - RNA, 128 nt, synthetic construct
  source 1..128: mol_type = other RNA
gccagacgctccccagagcagttttagagctagaaatagcaagttaaaataaggctagtccgttatcaacttgaaaaagtggcaccgagtcggtgcttatgatgtgcgtggtatgacttctggggagc

SEQ ID NO: 2216 - RNA, 134 nt, synthetic construct
  source 1..134: mol_type = other RNA
gccagacgctccccagagcagttttagagctagaaatagcaagttaaaataaggctagtccgttatcaacttgaaaaagtggcaccgagtcggtgctcggcggacggaccgctgcgcagggctttctggggagc

SEQ ID NO: 2217 - RNA, 121 nt, synthetic construct
  source 1..121: mol_type = other RNA
gccagacgctccccagagcagttttagagctagaaatagcaagttaaaataaggctagtccgttatcaacttgaaaaagtggcaccgagtcggtgcaagggcggtggcccgtctggggagc

SEQ ID NO: 2218 - RNA, 136 nt, synthetic construct
  source 1..136: mol_type = other RNA
gccagacgctccccagagcagttttagagctagaaatagcaagttaaaataaggctagtccgttatcaacttgaaaaagtggcaccgagtcggtgcacatggagaacagaatatctcttgtgcagatctggggagc

SEQ ID NO: 2219 - RNA, 126 nt, synthetic construct
  source 1..126: mol_type = other RNA
gccagacgctccccagagcagttttagagctagaaatagcaagttaaaataaggctagtccgttatcaacttgaaaaagtggcaccgagtcggtgcaccagccggcttccgccggctctggggagc

SEQ ID NO: 2220 - RNA, 136 nt, synthetic construct
  source 1..136: mol_type = other RNA
gccagacgctccccagagcagttttagagctagaaatagcaagttaaaataaggctagtccgttatcaacttgaaaaagtggcaccgagtcggtgcaccccgcggggcgtgtgcccataccccggctctggggagc

SEQ ID NO: 2221 - RNA, 136 nt, synthetic construct
  source 1..136: mol_type = other RNA
gccagacgctccccagagcagttttagagctagaaatagcaagttaaaataaggctagtccgttatcaacttgaaaaagtggcaccgagtcggtgcacccgtgggagtgtcgagcacttggatcactctggggagc

SEQ ID NO: 2222 - RNA, 131 nt, synthetic construct
  source 1..131: mol_type = other RNA
gccagacgctccccagagcagttttagagctagaaatagcaagttaaaataaggctagtccgttatcaacttgaaaaagtggcaccgagtcggtgcacgaggcggcccttgcgccgcaccctctggggagc

SEQ ID NO: 2223 - RNA, 121 nt, synthetic construct
  source 1..121: mol_type = other RNA
gccagacgctccccagagcagttttagagctagaaatagcaagttaaaataaggctagtccgttatcaacttgaaaaagtggcaccgagtcggtgcacgccgatagggcaatctggggagc

SEQ ID NO: 2224 - RNA, 126 nt, synthetic construct
  source 1..126: mol_type = other RNA
gccagacgctccccagagcagttttagagctagaaatagcaagttaaaataaggctagtccgttatcaacttgaaaaagtggcaccgagtcggtgcagctcgcggaacagcgcgactctggggagc

SEQ ID NO: 2225 - RNA, 121 nt, synthetic construct
  source 1..121: mol_type = other RNA
gccagacgctccccagagcagttttagagctagaaatagcaagttaaaataaggctagtccgttatcaacttgaaaaagtggcaccgagtcggtgcaggaccctcggtcgttctggggagc

SEQ ID NO: 2226 - RNA, 121 nt, synthetic construct
  source 1..121: mol_type = other RNA
gccagacgctccccagagcagttttagagctagaaatagcaagttaaaataaggctagtccgttatcaacttgaaaaagtggcaccgagtcggtgcatatgcatcgctcaatctggggagc

SEQ ID NO: 2227 - RNA, 126 nt, synthetic construct
  source 1..126: mol_type = other RNA
gccagacgctccccagagcagttttagagctagaaatagcaagttaaaataaggctagtccgttatcaacttgaaaaagtggcaccgagtcggtgcatcagcgtcttgcctggacctctggggagc

SEQ ID NO: 2228 - RNA, 121 nt, synthetic construct
  source 1..121: mol_type = other RNA
gccagacgctccccagagcagttttagagctagaaatagcaagttaaaataaggctagtccgttatcaacttgaaaaagtggcaccgagtcggtgcatgccaatggggcaatctggggagc

SEQ ID NO: 2229 - RNA, 136 nt, synthetic construct
  source 1..136: mol_type = other RNA
gccagacgctccccagagcagttttagagctagaaatagcaagttaaaataaggctagtccgttatcaacttgaaaaagtggcaccgagtcggtgcattcatgtgttcgattctccctcgggcacatctggggagc

SEQ ID NO: 2230 - RNA, 136 nt, synthetic construct
  source 1..136: mol_type = other RNA
gccagacgctccccagagcagttttagagctagaaatagcaagttaaaataaggctagtccgttatcaacttgaaaaagtggcaccgagtcggtgcccaggaagaaattagagagaatcttgctcatctggggagc

SEQ ID NO: 2231 - RNA, 136 nt, synthetic construct
  source 1..136: mol_type = other RNA
gccagacgctccccagagcagttttagagctagaaatagcaagttaaaataaggctagtccgttatcaacttgaaaaagtggcaccgagtcggtgccgacaggagcgtcgcacacgctcggtctcctctggggagc

SEQ ID NO: 2232 - RNA, 131 nt, synthetic construct
  source 1..131: mol_type = other RNA
gccagacgctccccagagcagttttagagctagaaatagcaagttaaaataaggctagtccgttatcaacttgaaaaagtggcaccgagtcggtgccgctccgcgaggaacccctccttcgtctggggagc

SEQ ID NO: 2233 - RNA, 131 nt, synthetic construct
  source 1..131: mol_type = other RNA
gccagacgctccccagagcagttttagagctagaaatagcaagttaaaataaggctagtccgttatcaacttgaaaaagtggcaccgagtcggtgccgtgggtcgcaacacggcccctcagtctggggagc

SEQ ID NO: 2234 - RNA, 131 nt, synthetic construct
  source 1..131: mol_type = other RNA
gccagacgctccccagagcagttttagagctagaaatagcaagttaaaataaggctagtccgttatcaacttgaaaaagtggcaccgagtcggtgcgagagatatattcgactcttccctatctggggagc

SEQ ID NO: 2235 - RNA, 136 nt, synthetic construct
  source 1..136: mol_type = other RNA
gccagacgctccccagagcagttttagagctagaaatagcaagttaaaataaggctagtccgttatcaacttgaaaaagtggcaccgagtcggtgcgagggcgaacgacccgtccctctgcgggtttctggggagc

SEQ ID NO: 2236 - RNA, 131 nt, synthetic construct
  source 1..131: mol_type = other RNA
gccagacgctccccagagcagttttagagctagaaatagcaagttaaaataaggctagtccgttatcaacttgaaaaagtggcaccgagtcggtgcgcgaaacctcaggtcgccgtttccttctggggagc

SEQ ID NO: 2237 - RNA, 131 nt, synthetic construct
  source 1..131: mol_type = other RNA
gccagacgctccccagagcagttttagagctagaaatagcaagttaaaataaggctagtccgttatcaacttgaaaaagtggcaccgagtcggtgcgcgcgatgtcagctacaccacttcgtctggggagc

SEQ ID NO: 2238 - RNA, 126 nt, synthetic construct
  source 1..126: mol_type = other RNA
gccagacgctccccagagcagttttagagctagaaatagcaagttaaaataaggctagtccgttatcaacttgaaaaagtggcaccgagtcggtgcgggaccccggtgtccccttttctggggagc

SEQ ID NO: 2239 - RNA, 136 nt, synthetic construct
  source 1..136: mol_type = other RNA
gccagacgctccccagagcagttttagagctagaaatagcaagttaaaataaggctagtccgttatcaacttgaaaaagtggcaccgagtcggtgcgggcccggtccacctgggaccttcggcgcctctggggagc

SEQ ID NO: 2240 - RNA, 126 nt, synthetic construct
  source 1..126: mol_type = other RNA
gccagacgctccccagagcagttttagagctagaaatagcaagttaaaataaggctagtccgttatcaacttgaaaaagtggcaccgagtcggtgcggggcgcgcacaggcgaccttctggggagc

SEQ ID NO: 2241 - RNA, 126 nt, synthetic construct
  source 1..126: mol_type = other RNA
gccagacgctccccagagcagttttagagctagaaatagcaagttaaaataaggctagtccgttatcaacttgaaaaagtggcaccgagtcggtgcggtcgcaactgtgtgcaccttctggggagc

SEQ ID NO: 2242 - RNA, 131 nt, synthetic construct
  source 1..131: mol_type = other RNA
gccagacgctccccagagcagttttagagctagaaatagcaagttaaaataaggctagtccgttatcaacttgaaaaagtggcaccgagtcggtgctgaagtgggttactgagaccctaagtctggggagc

SEQ ID NO: 2243 - RNA, 121 nt, synthetic construct
  source 1..121: mol_type = other RNA
gccagacgctccccagagcagttttagagctagaaatagcaagttaaaataaggctagtccgttatcaacttgaaaaagtggcaccgagtcggtgctgatccatagctacatctggggagc

SEQ ID NO: 2244 - RNA, 126 nt, synthetic construct
  source 1..126: mol_type = other RNA
gccagacgctccccagagcagttttagagctagaaatagcaagttaaaataaggctagtccgttatcaacttgaaaaagtggcaccgagtcggtgctgtggcaattgtagccaccttctggggagc

SEQ ID NO: 2245 - RNA, 121 nt, synthetic construct
  source 1..121: mol_type = other RNA
gccagacgctccccagagcagttttagagctagaaatagcaagttaaaataaggctagtccgttatcaacttgaaaaagtggcaccgagtcggtgcttggcccaccggccctctggggagc

SEQ ID NO: 2246 - RNA, 126 nt, synthetic construct
  source 1..126: mol_type = other RNA
gccagacgctccccagagcagttttagagctagaaatagcaagttaaaataaggctagtccgttatcaacttgaaaaagtggcaccgagtcggtgcttgtcgtagtgcacaccaactctggggagc

SEQ ID NO: 2247 - RNA, 126 nt, synthetic construct
  source 1..126: mol_type = other RNA
gccagacgctccccagagcagttttagagctagaaatagcaagttaaaataaggctagtccgttatcaacttgaaaaagtggcaccgagtcggtgctttagttgggtacagctacttctggggagc

SEQ ID NO: 2248 - RNA, 118 nt, synthetic construct
  source 1..118: mol_type = other RNA
gccagacgctccccagagcagttttagagctagaaatagcaagttaaaataaggctagtccgttatcaacttgaaaaagtggcaccgagtcggtgcaagactgagtgctctggggagc

SEQ ID NO: 2249 - RNA, 120 nt, synthetic construct
  source 1..120: mol_type = other RNA
gccagacgctccccagagcagttttagagctagaaatagcaagttaaaataaggctagtccgttatcaacttgaaaaagtggcaccgagtcggtgcggaagactgagtgctctggggagc

SEQ ID NO: 2250 - RNA, 122 nt, synthetic construct
  source 1..122: mol_type = other RNA
gccagacgctccccagagcagttttagagctagaaatagcaagttaaaataaggctagtccgttatcaacttgaaaaagtggcaccgagtcggtgcttggaagactgagtgctctggggagc

SEQ ID NO: 2251 - RNA, 124 nt, synthetic construct
  source 1..124: mol_type = other RNA
gccagacgctccccagagcagttttagagctagaaatagcaagttaaaataaggctagtccgttatcaacttgaaaaagtggcaccgagtcggtgccgttggaagactgagtgctctggggagc

SEQ ID NO: 2252 - RNA, 126 nt, synthetic construct
  source 1..126: mol_type = other RNA
gccagacgctccccagagcagttttagagctagaaatagcaagttaaaataaggctagtccgttatcaacttgaaaaagtggcaccgagtcggtgccccgttggaagactgagtgctctggggagc

SEQ ID NO: 2253 - RNA, 118 nt, synthetic construct
  source 1..118: mol_type = other RNA
gccagacgctccccagagcagttttagagctagaaatagcaagttaaaataaggctagtccgttatcaacttgaaaaagtggcaccgagtcggtgccgcggccggcgatctggggagc

SEQ ID NO: 2254 - RNA, 120 nt, synthetic construct
  source 1..120: mol_type = other RNA
gccagacgctccccagagcagttttagagctagaaatagcaagttaaaataaggctagtccgttatcaacttgaaaaagtggcaccgagtcggtgctccgcggccggcgatctggggagc

SEQ ID NO: 2255 - RNA, 122 nt, synthetic construct
  source 1..122: mol_type = other RNA
gccagacgctccccagagcagttttagagctagaaatagcaagttaaaataaggctagtccgttatcaacttgaaaaagtggcaccgagtcggtgcggtccgcggccggcgatctggggagc

SEQ ID NO: 2256 - RNA, 124 nt, synthetic construct
  source 1..124: mol_type = other RNA
gccagacgctccccagagcagttttagagctagaaatagcaagttaaaataaggctagtccgttatcaacttgaaaaagtggcaccgagtcggtgccgggtccgcggccggcgatctggggagc

SEQ ID NO: 2257 - RNA, 126 nt, synthetic construct
  source 1..126: mol_type = other RNA
gccagacgctccccagagcagttttagagctagaaatagcaagttaaaataaggctagtccgttatcaacttgaaaaagtggcaccgagtcggtgcgccgggtccgcggccggcgatctggggagc

SEQ ID NO: 2258 - RNA, 118 nt, synthetic construct
  source 1..118: mol_type = other RNA
gccagacgctccccagagcagttttagagctagaaatagcaagttaaaataaggctagtccgttatcaacttgaaaaagtggcaccgagtcggtgcccagtcctgtgatctggggagc

SEQ ID NO: 2259 - RNA, 120 nt, synthetic construct
  source 1..120: mol_type = other RNA
gccagacgctccccagagcagttttagagctagaaatagcaagttaaaataaggctagtccgttatcaacttgaaaaagtggcaccgagtcggtgcctccagtcctgtgatctggggagc

SEQ ID NO: 2260 - RNA, 122 nt, synthetic construct
  source 1..122: mol_type = other RNA
gccagacgctccccagagcagttttagagctagaaatagcaagttaaaataaggctagtccgttatcaacttgaaaaagtggcaccgagtcggtgcagctccagtcctgtgatctggggagc

SEQ ID NO: 2261 - RNA, 124 nt, synthetic construct
  source 1..124: mol_type = other RNA
gccagacgctccccagagcagttttagagctagaaatagcaagttaaaataaggctagtccgttatcaacttgaaaaagtggcaccgagtcggtgcccagctccagtcctgtgatctggggagc

SEQ ID NO: 2262 - RNA, 126 nt, synthetic construct
  source 1..126: mol_type = other RNA
gccagacgctccccagagcagttttagagctagaaatagcaagttaaaataaggctagtccgttatcaacttgaaaaagtggcaccgagtcggtgcgcccagctccagtcctgtgatctggggagc

SEQ ID NO: 2263 - RNA, 20 nt, synthetic construct
  source 1..20: mol_type = other RNA
agcaaatttcccgagtaagc

SEQ ID NO: 2264 - RNA, 17 nt, synthetic construct
  source 1..17: mol_type = other RNA
tactcgggaaatttgct

SEQ ID NO: 2265 - RNA, 16 nt, synthetic construct
  source 1..16: mol_type = other RNA
tactcgggaaatttgc

SEQ ID NO: 2266 - RNA, 15 nt, synthetic construct
  source 1..15: mol_type = other RNA
tactcgggaaatttg

SEQ ID NO: 2267 - RNA, 14 nt, synthetic construct
  source 1..14: mol_type = other RNA
tactcgggaaattt

SEQ ID NO: 2268 - RNA, 13 nt, synthetic construct
  source 1..13: mol_type = other RNA
tactcgggaaatt

SEQ ID NO: 2269 - RNA, 12 nt, synthetic construct
  source 1..12: mol_type = other RNA
tactcgggaaat

SEQ ID NO: 2270 - RNA, 11 nt, synthetic construct
  source 1..11: mol_type = other RNA
tactcgggaaa

SEQ ID NO: 2271 - RNA, 10 nt, synthetic construct
  source 1..10: mol_type = other RNA
tactcgggaa

SEQ ID NO: 2272-2278 - skipped (7 entries)

SEQ ID NO: 2279 - RNA, 144 nt, synthetic construct
  source 1..144: mol_type = other RNA
agcaaatttcccgagtaagcgttttagagctagaaatagcaagttaaaataaggctagtccgttatcaacttgaaaaagtggcaccgagtcggtgcatgatcctgacgacggagaccgccgtcgtcgacaagcctactcgggaa

SEQ ID NO: 2280 - RNA, 146 nt, synthetic construct
  source 1..146: mol_type = other RNA
agcaaatttcccgagtaagcgttttagagctagaaatagcaagttaaaataaggctagtccgttatcaacttgaaaaagtggcaccgagtcggtgcatgatcctgacgacggagaccgccgtcgtcgacaagcctactcgggaaat

SEQ ID NO: 2281 - RNA, 20 nt, synthetic construct
  source 1..20: mol_type = other RNA
agcagcgcaagtgaggaggg

SEQ ID NO: 2282 - RNA, 17 nt, synthetic construct
  source 1..17: mol_type = other RNA
tcctcacttgcgctgct

SEQ ID NO: 2283 - RNA, 16 nt, synthetic construct
  source 1..16: mol_type = other RNA
tcctcacttgcgctgc

SEQ ID NO: 2284 - RNA, 15 nt, synthetic construct
  source 1..15: mol_type = other RNA
tcctcacttgcgctg

SEQ ID NO: 2285 - RNA, 14 nt, synthetic construct
  source 1..14: mol_type = other RNA
tcctcacttgcgct

SEQ ID NO: 2286 - RNA, 13 nt, synthetic construct
  source 1..13: mol_type = other RNA
tcctcacttgcgc

SEQ ID NO: 2287 - RNA, 12 nt, synthetic construct
  source 1..12: mol_type = other RNA
tcctcacttgcg

SEQ ID NO: 2288 - RNA, 11 nt, synthetic construct
  source 1..11: mol_type = other RNA
tcctcacttgc

SEQ ID NO: 2289 - RNA, 10 nt, synthetic construct
  source 1..10: mol_type = other RNA
tcctcacttg

SEQ ID NO: 2290-2296 - skipped (7 entries)

SEQ ID NO: 2297 - RNA, 144 nt, synthetic construct
  source 1..144: mol_type = other RNA
agcagcgcaagtgaggaggggttttagagctagaaatagcaagttaaaataaggctagtccgttatcaacttgaaaaagtggcaccgagtcggtgcatgatcctgacgacggagaccgccgtcgtcgacaagcctcctcacttg

SEQ ID NO: 2298 - RNA, 146 nt, synthetic construct
  source 1..146: mol_type = other RNA
agcagcgcaagtgaggaggggttttagagctagaaatagcaagttaaaataaggctagtccgttatcaacttgaaaaagtggcaccgagtcggtgcatgatcctgacgacggagaccgccgtcgtcgacaagcctcctcacttgcg

SEQ ID NO: 2299 - RNA, 20 nt, synthetic construct
  source 1..20: mol_type = other RNA
tgtcagcgagtcggaggacg

SEQ ID NO: 2300 - RNA, 17 nt, synthetic construct
  source 1..17: mol_type = other RNA
cctccgactcgctgaca

SEQ ID NO: 2301 - RNA, 16 nt, synthetic construct
  source 1..16: mol_type = other RNA
cctccgactcgctgac

SEQ ID NO: 2302 - RNA, 15 nt, synthetic construct
  source 1..15: mol_type = other RNA
cctccgactcgctga

SEQ ID NO: 2303 - RNA, 14 nt, synthetic construct
  source 1..14: mol_type = other RNA
cctccgactcgctg

SEQ ID NO: 2304 - RNA, 13 nt, synthetic construct
  source 1..13: mol_type = other RNA
cctccgactcgct

SEQ ID NO: 2305 - RNA, 12 nt, synthetic construct
  source 1..12: mol_type = other RNA
cctccgactcgc

SEQ ID NO: 2306 - RNA, 11 nt, synthetic construct
  source 1..11: mol_type = other RNA
cctccgactcg

SEQ ID NO: 2307 - RNA, 10 nt, synthetic construct
  source 1..10: mol_type = other RNA
cctccgactc

SEQ ID NO: 2308-2314 - skipped (7 entries)

SEQ ID NO: 2315 - RNA, 144 nt, synthetic construct
  source 1..144: mol_type = other RNA
tgtcagcgagtcggaggacggttttagagctagaaatagcaagttaaaataaggctagtccgttatcaacttgaaaaagtggcaccgagtcggtgcatgatcctgacgacggagaccgccgtcgtcgacaagcccctccgactc

SEQ ID NO: 2316 - RNA, 146 nt, synthetic construct
  source 1..146: mol_type = other RNA
tgtcagcgagtcggaggacggttttagagctagaaatagcaagttaaaataaggctagtccgttatcaacttgaaaaagtggcaccgagtcggtgcatgatcctgacgacggagaccgccgtcgtcgacaagcccctccgactcgc

SEQ ID NO: 2317 - RNA, 20 nt, synthetic construct
  source 1..20: mol_type = other RNA
cctgtagcctgtcagcgagt

SEQ ID NO: 2318 - RNA, 17 nt, synthetic construct
  source 1..17: mol_type = other RNA
cgctgacaggctacagg

SEQ ID NO: 2319 - RNA, 16 nt, synthetic construct
  source 1..16: mol_type = other RNA
cgctgacaggctacag

SEQ ID NO: 2320 - RNA, 15 nt, synthetic construct
  source 1..15: mol_type = other RNA
cgctgacaggctaca

SEQ ID NO: 2321 - RNA, 14 nt, synthetic construct
  source 1..14: mol_type = other RNA
cgctgacaggctac

SEQ ID NO: 2322 - RNA, 13 nt, synthetic construct
  source 1..13: mol_type = other RNA
cgctgacaggcta

SEQ ID NO: 2323 - RNA, 12 nt, synthetic construct
  source 1..12: mol_type = other RNA
cgctgacaggct

SEQ ID NO: 2324 - RNA, 11 nt, synthetic construct
  source 1..11: mol_type = other RNA
cgctgacaggc

SEQ ID NO: 2325 - RNA, 10 nt, synthetic construct
  source 1..10: mol_type = other RNA
cgctgacagg

SEQ ID NO: 2326-2332 - skipped (7 entries)

SEQ ID NO: 2333 - RNA, 144 nt, synthetic construct
  source 1..144: mol_type = other RNA
cctgtagcctgtcagcgagtgttttagagctagaaatagcaagttaaaataaggctagtccgttatcaacttgaaaaagtggcaccgagtcggtgcatgatcctgacgacggagaccgccgtcgtcgacaagcccgctgacagg

SEQ ID NO: 2334 - RNA, 146 nt, synthetic construct
  source 1..146: mol_type = other RNA
cctgtagcctgtcagcgagtgttttagagctagaaatagcaagttaaaataaggctagtccgttatcaacttgaaaaagtggcaccgagtcggtgcatgatcctgacgacggagaccgccgtcgtcgacaagcccgctgacaggct

SEQ ID NO: 2335 - RNA, 20 nt, synthetic construct
  source 1..20: mol_type = other RNA
gcccggcttgctgccttccc

SEQ ID NO: 2336 - RNA, 17 nt, synthetic construct
  source 1..17: mol_type = other RNA
aaggcagcaagccgggc

SEQ ID NO: 2337 - RNA, 16 nt, synthetic construct
  source 1..16: mol_type = other RNA
aaggcagcaagccggg

SEQ ID NO: 2338 - RNA, 15 nt, synthetic construct
  source 1..15: mol_type = other RNA
aaggcagcaagccgg

SEQ ID NO: 2339 - RNA, 14 nt, synthetic construct
  source 1..14: mol_type = other RNA
aaggcagcaagccg

SEQ ID NO: 2340 - RNA, 13 nt, synthetic construct
  source 1..13: mol_type = other RNA
aaggcagcaagcc

SEQ ID NO: 2341 - RNA, 12 nt, synthetic construct
  source 1..12: mol_type = other RNA
aaggcagcaagc

SEQ ID NO: 2342 - RNA, 11 nt, synthetic construct
  source 1..11: mol_type = other RNA
aaggcagcaag

SEQ ID NO: 2343 - RNA, 10 nt, synthetic construct
  source 1..10: mol_type = other RNA
aaggcagcaa

SEQ ID NO: 2344-2350 - skipped (7 entries)

SEQ ID NO: 2351 - RNA, 144 nt, synthetic construct
  source 1..144: mol_type = other RNA
gcccggcttgctgccttcccgttttagagctagaaatagcaagttaaaataaggctagtccgttatcaacttgaaaaagtggcaccgagtcggtgcatgatcctgacgacggagaccgccgtcgtcgacaagccaaggcagcaa

SEQ ID NO: 2352 - RNA, 146 nt, synthetic construct
  source 1..146: mol_type = other RNA
gcccggcttgctgccttcccgttttagagctagaaatagcaagttaaaataaggctagtccgttatcaacttgaaaaagtggcaccgagtcggtgcatgatcctgacgacggagaccgccgtcgtcgacaagccaaggcagcaagc

SEQ ID NO: 2353 - RNA, 20 nt, synthetic construct
  source 1..20: mol_type = other RNA
gatccccgaaaaagcgggtt

SEQ ID NO: 2354 - RNA, 17 nt, synthetic construct
  source 1..17: mol_type = other RNA
ccgctttttcggggatc

SEQ ID NO: 2355 - RNA, 16 nt, synthetic construct
  source 1..16: mol_type = other RNA
ccgctttttcggggat

SEQ ID NO: 2356 - RNA, 15 nt, synthetic construct
  source 1..15: mol_type = other RNA
ccgctttttcgggga

SEQ ID NO: 2357 - RNA, 14 nt, synthetic construct
  source 1..14: mol_type = other RNA
ccgctttttcgggg

SEQ ID NO: 2358 - RNA, 13 nt, synthetic construct
  source 1..13: mol_type = other RNA
ccgctttttcggg

SEQ ID NO: 2359 - RNA, 12 nt, synthetic construct
  source 1..12: mol_type = other RNA
ccgctttttcgg

SEQ ID NO: 2360 - RNA, 11 nt, synthetic construct
  source 1..11: mol_type = other RNA
ccgctttttcg

SEQ ID NO: 2361 - RNA, 10 nt, synthetic construct
  source 1..10: mol_type = other RNA
ccgctttttc

SEQ ID NO: 2362-2368 - skipped (7 entries)

SEQ ID NO: 2369 - RNA, 144 nt, synthetic construct
  source 1..144: mol_type = other RNA
gatccccgaaaaagcgggttgttttagagctagaaatagcaagttaaaataaggctagtccgttatcaacttgaaaaagtggcaccgagtcggtgcatgatcctgacgacggagaccgccgtcgtcgacaagccccgctttttc

SEQ ID NO: 2370 - RNA, 146 nt, synthetic construct
  source 1..146: mol_type = other RNA
gatccccgaaaaagcgggttgttttagagctagaaatagcaagttaaaataaggctagtccgttatcaacttgaaaaagtggcaccgagtcggtgcatgatcctgacgacggagaccgccgtcgtcgacaagccccgctttttcgg

SEQ ID NO: 2371 - RNA, 131 nt, synthetic construct
  source 1..131: mol_type = other RNA
gatccccgaaaaagcgggttgttttagagctagaaatagcaagttaaaataaggctagtccgttatcaacttgaaaaagtggcaccgagtcggtgctggttaaatgctatggaagcgaactccgctttttc

SEQ ID NO: 2372 - RNA, 146 nt, synthetic construct
  source 1..146: mol_type = other RNA
gatccccgaaaaagcgggttgttttagagctagaaatagcaagttaaaataaggctagtccgttatcaacttgaaaaagtggcaccgagtcggtgcataccctaatgacctgtcctttactctcggccggcagtatccgctttttc

SEQ ID NO: 2373 - RNA, 134 nt, synthetic construct
  source 1..134: mol_type = other RNA
gatccccgaaaaagcgggttgttttagagctagaaatagcaagttaaaataaggctagtccgttatcaacttgaaaaagtggcaccgagtcggtgccgtatcatattaaataccaacgagatatccgctttttc

SEQ ID NO: 2374 - RNA, 126 nt, synthetic construct
  source 1..126: mol_type = other RNA
gatccccgaaaaagcgggttgttttagagctagaaatagcaagttaaaataaggctagtccgttatcaacttgaaaaagtggcaccgagtcggtgcctctctcttctgactcgcttccgctttttc

SEQ ID NO: 2375 - RNA, 134 nt, synthetic construct
  source 1..134: mol_type = other RNA
gatccccgaaaaagcgggttgttttagagctagaaatagcaagttaaaataaggctagtccgttatcaacttgaaaaagtggcaccgagtcggtgcttctggaggcacgcgtgcgtcgcttgatccgctttttc

SEQ ID NO: 2376 - RNA, 124 nt, synthetic construct
  source 1..124: mol_type = other RNA
gatccccgaaaaagcgggttgttttagagctagaaatagcaagttaaaataaggctagtccgttatcaacttgaaaaagtggcaccgagtcggtgccggccaccagcgcgcgatccgctttttc

SEQ ID NO: 2377 - RNA, 144 nt, synthetic construct
  source 1..144: mol_type = other RNA
gatccccgaaaaagcgggttgttttagagctagaaatagcaagttaaaataaggctagtccgttatcaacttgaaaaagtggcaccgagtcggtgcggcttgtcgacgacggcggtctccgtcgtcaggatcatccgctttttc

SEQ ID NO: 2378 - RNA, 124 nt, synthetic construct
  source 1..124: mol_type = other RNA
gatccccgaaaaagcgggttgttttagagctagaaatagcaagttaaaataaggctagtccgttatcaacttgaaaaagtggcaccgagtcggtgcgcccgacagcgcgcgcatccgctttttc

SEQ ID NO: 2379 - RNA, 131 nt, synthetic construct
  source 1..131: mol_type = other RNA
gatccccgaaaaagcgggttgttttagagctagaaatagcaagttaaaataaggctagtccgttatcaacttgaaaaagtggcaccgagtcggtgcttacagcctgggcgcgtggacgcatccgctttttc

SEQ ID NO: 2380 - RNA, 131 nt, synthetic construct
  source 1..131: mol_type = other RNA
gatccccgaaaaagcgggttgttttagagctagaaatagcaagttaaaataaggctagtccgttatcaacttgaaaaagtggcaccgagtcggtgcccgtagtattgacacctactgccatccgctttttc

SEQ ID NO: 2381 - RNA, 136 nt, synthetic construct
  source 1..136: mol_type = other RNA
gatccccgaaaaagcgggttgttttagagctagaaatagcaagttaaaataaggctagtccgttatcaacttgaaaaagtggcaccgagtcggtgcctccgttcttcggcgcgctgagtccgccatccgctttttc

SEQ ID NO: 2382 - RNA, 141 nt, synthetic construct
  source 1..141: mol_type = other RNA
gatccccgaaaaagcgggttgttttagagctagaaatagcaagttaaaataaggctagtccgttatcaacttgaaaaagtggcaccgagtcggtgcactgagaggcggggcgcgggtcgttaaggccccatccgctttttc

SEQ ID NO: 2383 - RNA, 121 nt, synthetic construct
  source 1..121: mol_type = other RNA
gatccccgaaaaagcgggttgttttagagctagaaatagcaagttaaaataaggctagtccgttatcaacttgaaaaagtggcaccgagtcggtgcggacggcccgtacatccgctttttc

SEQ ID NO: 2384 - RNA, 121 nt, synthetic construct
  source 1..121: mol_type = other RNA
gatccccgaaaaagcgggttgttttagagctagaaatagcaagttaaaataaggctagtccgttatcaacttgaaaaagtggcaccgagtcggtgcccgcttgcgaacaatccgctttttc

SEQ ID NO: 2385 - RNA, 136 nt, synthetic construct
  source 1..136: mol_type = other RNA
gatccccgaaaaagcgggttgttttagagctagaaatagcaagttaaaataaggctagtccgttatcaacttgaaaaagtggcaccgagtcggtgcgtaatccaagctcactaggggcacaacttgccgctttttc

SEQ ID NO: 2386 - RNA, 146 nt, synthetic construct
  source 1..146: mol_type = other RNA
gatccccgaaaaagcgggttgttttagagctagaaatagcaagttaaaataaggctagtccgttatcaacttgaaaaagtggcaccgagtcggtgctttagtaacagacacactagggacggttatacgaacattgccgctttttc

SEQ ID NO: 2387 - RNA, 141 nt, synthetic construct
  source 1..141: mol_type = other RNA
gatccccgaaaaagcgggttgttttagagctagaaatagcaagttaaaataaggctagtccgttatcaacttgaaaaagtggcaccgagtcggtgcccccggccccgggcccgggagcggcgggccgggtgccgctttttc

SEQ ID NO: 2388 - RNA, 116 nt, synthetic construct
  source 1..116: mol_type = other RNA
gatccccgaaaaagcgggttgttttagagctagaaatagcaagttaaaataaggctagtccgttatcaacttgaaaaagtggcaccgagtcggtgccccgccggtgccgctttttc

SEQ ID NO: 2389 - RNA, 136 nt, synthetic construct
  source 1..136: mol_type = other RNA
gatccccgaaaaagcgggttgttttagagctagaaatagcaagttaaaataaggctagtccgttatcaacttgaaaaagtggcaccgagtcggtgcagcccagttactcaatttcctgtaatagtgccgctttttc

SEQ ID NO: 2390 - RNA, 134 nt, synthetic construct
  source 1..134: mol_type = other RNA
gatccccgaaaaagcgggttgttttagagctagaaatagcaagttaaaataaggctagtccgttatcaacttgaaaaagtggcaccgagtcggtgcaagcgtggcatgagtgcgccaccgtctgccgctttttc

SEQ ID NO: 2391 - RNA, 136 nt, synthetic construct
  source 1..136: mol_type = other RNA
gatccccgaaaaagcgggttgttttagagctagaaatagcaagttaaaataaggctagtccgttatcaacttgaaaaagtggcaccgagtcggtgcctgctagggcggtacgccggcggggcgctgccgctttttc

SEQ ID NO: 2392 - RNA, 116 nt, synthetic construct
  source 1..116: mol_type = other RNA
gatccccgaaaaagcgggttgttttagagctagaaatagcaagttaaaataaggctagtccgttatcaacttgaaaaagtggcaccgagtcggtgcagcagctatgccgctttttc

SEQ ID NO: 2393 - RNA, 124 nt, synthetic construct
  source 1..124: mol_type = other RNA
gatccccgaaaaagcgggttgttttagagctagaaatagcaagttaaaataaggctagtccgttatcaacttgaaaaagtggcaccgagtcggtgccggggagctccgctgatgccgctttttc

SEQ ID NO: 2394 - RNA, 134 nt, synthetic construct
  source 1..134: mol_type = other RNA
gatccccgaaaaagcgggttgttttagagctagaaatagcaagttaaaataaggctagtccgttatcaacttgaaaaagtggcaccgagtcggtgccacgagctccgccaagtgaccaccgatgccgctttttc

SEQ ID NO: 2395 - RNA, 124 nt, synthetic construct
  source 1..124: mol_type = other RNA
gatccccgaaaaagcgggttgttttagagctagaaatagcaagttaaaataaggctagtccgttatcaacttgaaaaagtggcaccgagtcggtgccactataggtatgcaatgccgctttttc

SEQ ID NO: 2396 - RNA, 134 nt, synthetic construct
  source 1..134: mol_type = other RNA
gatccccgaaaaagcgggttgttttagagctagaaatagcaagttaaaataaggctagtccgttatcaacttgaaaaagtggcaccgagtcggtgctgcaccattcaatcgttccttgtcctggccgctttttc

SEQ ID NO: 2397 - RNA, 128 nt, synthetic construct
  source 1..128: mol_type = other RNA
gatccccgaaaaagcgggttgttttagagctagaaatagcaagttaaaataaggctagtccgttatcaacttgaaaaagtggcaccgagtcggtgcgggaccatatggtaccacctggccgctttttc

SEQ ID NO: 2398 - RNA, 126 nt, synthetic construct
  source 1..126: mol_type = other RNA
gatccccgaaaaagcgggttgttttagagctagaaatagcaagttaaaataaggctagtccgttatcaacttgaaaaagtggcaccgagtcggtgcgccggagcagggccgactggccgctttttc

SEQ ID NO: 2399 - RNA, 128 nt, synthetic construct
  source 1..128: mol_type = other RNA
gatccccgaaaaagcgggttgttttagagctagaaatagcaagttaaaataaggctagtccgttatcaacttgaaaaagtggcaccgagtcggtgccatcggccgccggcggttggggccgctttttc

SEQ ID NO: 2400 - RNA, 121 nt, synthetic construct
  source 1..121: mol_type = other RNA
gatccccgaaaaagcgggttgttttagagctagaaatagcaagttaaaataaggctagtccgttatcaacttgaaaaagtggcaccgagtcggtgccggtccggcccggggccgctttttc

SEQ ID NO: 2401 - RNA, 134 nt, synthetic construct
  source 1..134: mol_type = other RNA
gatccccgaaaaagcgggttgttttagagctagaaatagcaagttaaaataaggctagtccgttatcaacttgaaaaagtggcaccgagtcggtgcggcggcgggagcggcccgtacgacggggccgctttttc

SEQ ID NO: 2402 - RNA, 141 nt, synthetic construct
  source 1..141: mol_type = other RNA
gatccccgaaaaagcgggttgttttagagctagaaatagcaagttaaaataaggctagtccgttatcaacttgaaaaagtggcaccgagtcggtgctagcacgtggtttcgcccttctggctacctaggggccgctttttc

SEQ ID NO: 2403 - RNA, 141 nt, synthetic construct
  source 1..141: mol_type = other RNA
gatccccgaaaaagcgggttgttttagagctagaaatagcaagttaaaataaggctagtccgttatcaacttgaaaaagtggcaccgagtcggtgccgcgctagcgggaccggatgtcccctgccctacttccgctttttc

SEQ ID NO: 2404 - RNA, 131 nt, synthetic construct
  source 1..131: mol_type = other RNA
gatccccgaaaaagcgggttgttttagagctagaaatagcaagttaaaataaggctagtccgttatcaacttgaaaaagtggcaccgagtcggtgcacggaaggcgcggtccgcgcaggggccgctttttc

SEQ ID NO: 2405 - RNA, 141 nt, synthetic construct
  source 1..141: mol_type = other RNA
gatccccgaaaaagcgggttgttttagagctagaaatagcaagttaaaataaggctagtccgttatcaacttgaaaaagtggcaccgagtcggtgcccgccgagcggccaccctagggctggcggcgcgggccgctttttc

SEQ ID NO: 2406 - RNA, 124 nt, synthetic construct
  source 1..124: mol_type = other RNA
gatccccgaaaaagcgggttgttttagagctagaaatagcaagttaaaataaggctagtccgttatcaacttgaaaaagtggcaccgagtcggtgcggctcctcctcgcgcgggccgctttttc

SEQ ID NO: 2407 - RNA, 121 nt, synthetic construct
  source 1..121: mol_type = other RNA
gatccccgaaaaagcgggttgttttagagctagaaatagcaagttaaaataaggctagtccgttatcaacttgaaaaagtggcaccgagtcggtgccggctggtcgccgggccgctttttc

SEQ ID NO: 2408 - RNA, 131 nt, synthetic construct
  source 1..131: mol_type = other RNA
gatccccgaaaaagcgggttgttttagagctagaaatagcaagttaaaataaggctagtccgttatcaacttgaaaaagtggcaccgagtcggtgcggccgggcctcgcggggcgcccgggccgctttttc

SEQ ID NO: 2409 - RNA, 136 nt, synthetic construct
  source 1..136: mol_type = other RNA
gatccccgaaaaagcgggttgttttagagctagaaatagcaagttaaaataaggctagtccgttatcaacttgaaaaagtggcaccgagtcggtgccacgtgcgcttcgggtttcgttcgccgattccgctttttc

SEQ ID NO: 2410 - RNA, 136 nt, synthetic construct
  source 1..136: mol_type = other RNA
gatccccgaaaaagcgggttgttttagagctagaaatagcaagttaaaataaggctagtccgttatcaacttgaaaaagtggcaccgagtcggtgcgcgcgctgaccggcgcggccaccacccgggccgctttttc

SEQ ID NO: 2411 - RNA, 124 nt, synthetic construct
  source 1..124: mol_type = other RNA
gatccccgaaaaagcgggttgttttagagctagaaatagcaagttaaaataaggctagtccgttatcaacttgaaaaagtggcaccgagtcggtgccggcgcgctgtacgagggccgctttttc

SEQ ID NO: 2412 - RNA, 128 nt, synthetic construct
  source 1..128: mol_type = other RNA
gatccccgaaaaagcgggttgttttagagctagaaatagcaagttaaaataaggctagtccgttatcaacttgaaaaagtggcaccgagtcggtgcaggcggttcgatgagccggcggccgctttttc

SEQ ID NO: 2413 - RNA, 121 nt, synthetic construct
  source 1..121: mol_type = other RNA
gatccccgaaaaagcgggttgttttagagctagaaatagcaagttaaaataaggctagtccgttatcaacttgaaaaagtggcaccgagtcggtgcctttacatcagaattccgctttttc

SEQ ID NO: 2414 - RNA, 134 nt, synthetic construct
  source 1..134: mol_type = other RNA
gatccccgaaaaagcgggttgttttagagctagaaatagcaagttaaaataaggctagtccgttatcaacttgaaaaagtggcaccgagtcggtgcggcaccggggcaccgccaccccacgcggccgctttttc

SEQ ID NO: 2415 - RNA, 126 nt, synthetic construct
  source 1..126: mol_type = other RNA
gatccccgaaaaagcgggttgttttagagctagaaatagcaagttaaaataaggctagtccgttatcaacttgaaaaagtggcaccgagtcggtgcttccggtcggagccctccggccgctttttc

SEQ ID NO: 2416 - RNA, 116 nt, synthetic construct
  source 1..116: mol_type = other RNA
gatccccgaaaaagcgggttgttttagagctagaaatagcaagttaaaataaggctagtccgttatcaacttgaaaaagtggcaccgagtcggtgccccttgccggccgctttttc

SEQ ID NO: 2417 - RNA, 124 nt, synthetic construct
  source 1..124: mol_type = other RNA
gatccccgaaaaagcgggttgttttagagctagaaatagcaagttaaaataaggctagtccgttatcaacttgaaaaagtggcaccgagtcggtgcaggcaggatcttgaaattccgctttttc

SEQ ID NO: 2418 - RNA, 136 nt, synthetic construct
  source 1..136: mol_type = other RNA
gatccccgaaaaagcgggttgttttagagctagaaatagcaagttaaaataaggctagtccgttatcaacttgaaaaagtggcaccgagtcggtgcgcacgctctcgtcggtccgccctgcgccggccgctttttc

SEQ ID NO: 2419 - RNA, 134 nt, synthetic construct
  source 1..134: mol_type = other RNA
gatccccgaaaaagcgggttgttttagagctagaaatagcaagttaaaataaggctagtccgttatcaacttgaaaaagtggcaccgagtcggtgccgccgcgcaccgcgcgtggcgtccccggccgctttttc

SEQ ID NO: 2420 - RNA, 121 nt, synthetic construct
  source 1..121: mol_type = other RNA
gatccccgaaaaagcgggttgttttagagctagaaatagcaagttaaaataaggctagtccgttatcaacttgaaaaagtggcaccgagtcggtgccccggcgccacccggccgctttttc

SEQ ID NO: 2421 - RNA, 136 nt, synthetic construct
  source 1..136: mol_type = other RNA
gatccccgaaaaagcgggttgttttagagctagaaatagcaagttaaaataaggctagtccgttatcaacttgaaaaagtggcaccgagtcggtgcgctccgcatggtctctgaacggacgaccggccgctttttc

SEQ ID NO: 2422 - RNA, 131 nt, synthetic construct
  source 1..131: mol_type = other RNA
gatccccgaaaaagcgggttgttttagagctagaaatagcaagttaaaataaggctagtccgttatcaacttgaaaaagtggcaccgagtcggtgccgcgcgcgctgcggagggtggtaggccgctttttc

SEQ ID NO: 2423 - RNA, 128 nt, synthetic construct
  source 1..128: mol_type = other RNA
gatccccgaaaaagcgggttgttttagagctagaaatagcaagttaaaataaggctagtccgttatcaacttgaaaaagtggcaccgagtcggtgcggggccctccgacccgcctaggccgctttttc

SEQ ID NO: 2424 - RNA, 146 nt, synthetic construct
  source 1..146: mol_type = other RNA
gatccccgaaaaagcgggttgttttagagctagaaatagcaagttaaaataaggctagtccgttatcaacttgaaaaagtggcaccgagtcggtgcggtgttcccaagcgaagtccctctggcaaaggtgaggaggccgctttttc

SEQ ID NO: 2425 - RNA, 136 nt, synthetic construct
  source 1..136: mol_type = other RNA
gatccccgaaaaagcgggttgttttagagctagaaatagcaagttaaaataaggctagtccgttatcaacttgaaaaagtggcaccgagtcggtgcctgtacccgtagccgcggccccatccgaggccgctttttc

SEQ ID NO: 2426 - RNA, 121 nt, synthetic construct
  source 1..121: mol_type = other RNA
gatccccgaaaaagcgggttgttttagagctagaaatagcaagttaaaataaggctagtccgttatcaacttgaaaaagtggcaccgagtcggtgccacctgcccagctgtccgctttttc

SEQ ID NO: 2427 - RNA, 131 nt, synthetic construct
  source 1..131: mol_type = other RNA
gatccccgaaaaagcgggttgttttagagctagaaatagcaagttaaaataaggctagtccgttatcaacttgaaaaagtggcaccgagtcggtgccgactgctcggcgcagcccacaaggccgctttttc

SEQ ID NO: 2428 - RNA, 126 nt, synthetic construct
  source 1..126: mol_type = other RNA
gatccccgaaaaagcgggttgttttagagctagaaatagcaagttaaaataaggctagtccgttatcaacttgaaaaagtggcaccgagtcggtgcccggcctggccttctaaaggccgctttttc

SEQ ID NO: 2429 - RNA, 146 nt, synthetic construct
  source 1..146: mol_type = other RNA
gatccccgaaaaagcgggttgttttagagctagaaatagcaagttaaaataaggctagtccgttatcaacttgaaaaagtggcaccgagtcggtgcgcctgcacccttgctcctcgacgagggcccgcaccggtcgccgctttttc

SEQ ID NO: 2430 - RNA, 116 nt, synthetic construct
  source 1..116: mol_type = other RNA
gatccccgaaaaagcgggttgttttagagctagaaatagcaagttaaaataaggctagtccgttatcaacttgaaaaagtggcaccgagtcggtgccgctcgctcgccgctttttc

SEQ ID NO: 2431 - RNA, 134 nt, synthetic construct
  source 1..134: mol_type = other RNA
gatccccgaaaaagcgggttgttttagagctagaaatagcaagttaaaataaggctagtccgttatcaacttgaaaaagtggcaccgagtcggtgcatcccttgcttccccacgggtaagctcgccgctttttc

SEQ ID NO: 2432 - RNA, 136 nt, synthetic construct
  source 1..136: mol_type = other RNA
gatccccgaaaaagcgggttgttttagagctagaaatagcaagttaaaataaggctagtccgttatcaacttgaaaaagtggcaccgagtcggtgcgcgcggcgtctactcctcgcctctacctcgccgctttttc

SEQ ID NO: 2433 - RNA, 134 nt, synthetic construct
  source 1..134: mol_type = other RNA
gatccccgaaaaagcgggttgttttagagctagaaatagcaagttaaaataaggctagtccgttatcaacttgaaaaagtggcaccgagtcggtgcgcaatgcaccgccgtgggcgccgtatcgccgctttttc

SEQ ID NO: 2434 - RNA, 124 nt, synthetic construct
  source 1..124: mol_type = other RNA
gatccccgaaaaagcgggttgttttagagctagaaatagcaagttaaaataaggctagtccgttatcaacttgaaaaagtggcaccgagtcggtgccggtgttcgggaagatcgccgctttttc

SEQ ID NO: 2435 - RNA, 121 nt, synthetic construct
  source 1..121: mol_type = other RNA
gatccccgaaaaagcgggttgttttagagctagaaatagcaagttaaaataaggctagtccgttatcaacttgaaaaagtggcaccgagtcggtgccgggccccgcgtgcgccgctttttc

SEQ ID NO: 2436 - RNA, 141 nt, synthetic construct
  source 1..141: mol_type = other RNA
gatccccgaaaaagcgggttgttttagagctagaaatagcaagttaaaataaggctagtccgttatcaacttgaaaaagtggcaccgagtcggtgctaatgcagcaacggtcgcgactccctgtgactgcgccgctttttc

SEQ ID NO: 2437 - RNA, 141 nt, synthetic construct
  source 1..141: mol_type = other RNA
gatccccgaaaaagcgggttgttttagagctagaaatagcaagttaaaataaggctagtccgttatcaacttgaaaaagtggcaccgagtcggtgcgggtgccatcttcctgggtagaggcgggacatgcgccgctttttc

SEQ ID NO: 2438 - RNA, 126 nt, synthetic construct
  source 1..126: mol_type = other RNA
gatccccgaaaaagcgggttgttttagagctagaaatagcaagttaaaataaggctagtccgttatcaacttgaaaaagtggcaccgagtcggtgctgcgagcgccccgcggggcgccgctttttc

SEQ ID NO: 2439 - RNA, 141 nt, synthetic construct
  source 1..141: mol_type = other RNA
gatccccgaaaaagcgggttgttttagagctagaaatagcaagttaaaataaggctagtccgttatcaacttgaaaaagtggcaccgagtcggtgcggccgatgccagtgacccgttcaacgggccgggcgccgctttttc

SEQ ID NO: 2440 - RNA, 141 nt, synthetic construct
  source 1..141: mol_type = other RNA
gatccccgaaaaagcgggttgttttagagctagaaatagcaagttaaaataaggctagtccgttatcaacttgaaaaagtggcaccgagtcggtgccgcggcggccggcaccgcgtcgcgcgctggcggcgccgctttttc

SEQ ID NO: 2441 - RNA, 141 nt, synthetic construct
  source 1..141: mol_type = other RNA
gatccccgaaaaagcgggttgttttagagctagaaatagcaagttaaaataaggctagtccgttatcaacttgaaaaagtggcaccgagtcggtgcttccgcccgcccgcgcccgggcccagcccgcggcgccgctttttc

SEQ ID NO: 2442 - RNA, 134 nt, synthetic construct
  source 1..134: mol_type = other RNA
gatccccgaaaaagcgggttgttttagagctagaaatagcaagttaaaataaggctagtccgttatcaacttgaaaaagtggcaccgagtcggtgctttccgaattggaaaggttgtcctcgcgccgctttttc

SEQ ID NO: 2443 - RNA, 124 nt, synthetic construct
  source 1..124: mol_type = other RNA
gatccccgaaaaagcgggttgttttagagctagaaatagcaagttaaaataaggctagtccgttatcaacttgaaaaagtggcaccgagtcggtgcggcaccccggcgtgcgcgccgctttttc

SEQ ID NO: 2444 - RNA, 131 nt, synthetic construct
  source 1..131: mol_type = other RNA
gatccccgaaaaagcgggttgttttagagctagaaatagcaagttaaaataaggctagtccgttatcaacttgaaaaagtggcaccgagtcggtgcgccaggccccgaccgctggagcgcgccgctttttc

SEQ ID NO: 2445 - RNA, 128 nt, synthetic construct
  source 1..128: mol_type = other RNA
gatccccgaaaaagcgggttgttttagagctagaaatagcaagttaaaataaggctagtccgttatcaacttgaaaaagtggcaccgagtcggtgccgacctattgggacgcggagcgccgctttttc

SEQ ID NO: 2446 - RNA, 141 nt, synthetic construct
  source 1..141: mol_type = other RNA
gatccccgaaaaagcgggttgttttagagctagaaatagcaagttaaaataaggctagtccgttatcaacttgaaaaagtggcaccgagtcggtgcccgcgcgtgccaggccccgacgggaggccccagcgccgctttttc

SEQ ID NO: 2447 - RNA, 121 nt, synthetic construct
  source 1..121: mol_type = other RNA
gatccccgaaaaagcgggttgttttagagctagaaatagcaagttaaaataaggctagtccgttatcaacttgaaaaagtggcaccgagtcggtgcccggtagcacgtccgccgctttttc

SEQ ID NO: 2448 - RNA, 116 nt, synthetic construct
  source 1..116: mol_type = other RNA
gatccccgaaaaagcgggttgttttagagctagaaatagcaagttaaaataaggctagtccgttatcaacttgaaaaagtggcaccgagtcggtgcccgtcctccgccgctttttc

SEQ ID NO: 2449 - RNA, 136 nt, synthetic construct
  source 1..136: mol_type = other RNA
gatccccgaaaaagcgggttgttttagagctagaaatagcaagttaaaataaggctagtccgttatcaacttgaaaaagtggcaccgagtcggtgctcggccccgcgccaggggcgcgatccgccgccgctttttc

SEQ ID NO: 2450 - RNA, 126 nt, synthetic construct
  source 1..126: mol_type = other RNA
gatccccgaaaaagcgggttgttttagagctagaaatagcaagttaaaataaggctagtccgttatcaacttgaaaaagtggcaccgagtcggtgcgggcgcacatcggcggcccgccgctttttc

SEQ ID NO: 2451 - RNA, 124 nt, synthetic construct
  source 1..124: mol_type = other RNA
gatccccgaaaaagcgggttgttttagagctagaaatagcaagttaaaataaggctagtccgttatcaacttgaaaaagtggcaccgagtcggtgcgcccgctcccgccgcccgccgctttttc

SEQ ID NO: 2452 - RNA, 124 nt, synthetic construct
  source 1..124: mol_type = other RNA
gatccccgaaaaagcgggttgttttagagctagaaatagcaagttaaaataaggctagtccgttatcaacttgaaaaagtggcaccgagtcggtgcttcttgcggtgcggaccgccgctttttc

SEQ ID NO: 2453 - RNA, 131 nt, synthetic construct
  source 1..131: mol_type = other RNA
gatccccgaaaaagcgggttgttttagagctagaaatagcaagttaaaataaggctagtccgttatcaacttgaaaaagtggcaccgagtcggtgcgcatgcacaggcacaatgtctgtttccgctttttc

SEQ ID NO: 2454 - RNA, 146 nt, synthetic construct
  source 1..146: mol_type = other RNA
gatccccgaaaaagcgggttgttttagagctagaaatagcaagttaaaataaggctagtccgttatcaacttgaaaaagtggcaccgagtcggtgccggcagactcgcgcgtgggccgggccccgtccgggcgacgccgctttttc

SEQ ID NO: 2455 - RNA, 141 nt, synthetic construct
  source 1..141: mol_type = other RNA
gatccccgaaaaagcgggttgttttagagctagaaatagcaagttaaaataaggctagtccgttatcaacttgaaaaagtggcaccgagtcggtgcgcctcccgctcacactccaaccggctgcgggcacgccgctttttc

SEQ ID NO: 2456 - RNA, 131 nt, synthetic construct
  source 1..131: mol_type = other RNA
gatccccgaaaaagcgggttgttttagagctagaaatagcaagttaaaataaggctagtccgttatcaacttgaaaaagtggcaccgagtcggtgcgggccgaaccggacctacggccacgccgctttttc

SEQ ID NO: 2457 - RNA, 126 nt, synthetic construct
  source 1..126: mol_type = other RNA
gatccccgaaaaagcgggttgttttagagctagaaatagcaagttaaaataaggctagtccgttatcaacttgaaaaagtggcaccgagtcggtgccccgtcgcggaggagggtagccgctttttc

SEQ ID NO: 2458 - RNA, 141 nt, synthetic construct
  source 1..141: mol_type = other RNA
gatccccgaaaaagcgggttgttttagagctagaaatagcaagttaaaataaggctagtccgttatcaacttgaaaaagtggcaccgagtcggtgcgtgttgagcccgcgaggtcgttcggcggtaacggtccgctttttc

SEQ ID NO: 2459 - RNA, 126 nt, synthetic construct
  source 1..126: mol_type = other RNA
gatccccgaaaaagcgggttgttttagagctagaaatagcaagttaaaataaggctagtccgttatcaacttgaaaaagtggcaccgagtcggtgcatgcagacctgccacgctagccgctttttc

SEQ ID NO: 2460 - RNA, 131 nt, synthetic construct
  source 1..131: mol_type = other RNA
gatccccgaaaaagcgggttgttttagagctagaaatagcaagttaaaataaggctagtccgttatcaacttgaaaaagtggcaccgagtcggtgcccggctccgtagcgatcgaagctagccgctttttc

SEQ ID NO: 2461 - RNA, 124 nt, synthetic construct
  source 1..124: mol_type = other RNA
gatccccgaaaaagcgggttgttttagagctagaaatagcaagttaaaataaggctagtccgttatcaacttgaaaaagtggcaccgagtcggtgcgacgctcggaccggatagccgctttttc

SEQ ID NO: 2462 - RNA, 131 nt, synthetic construct
  source 1..131: mol_type = other RNA
gatccccgaaaaagcgggttgttttagagctagaaatagcaagttaaaataaggctagtccgttatcaacttgaaaaagtggcaccgagtcggtgcggcagcgggctcggggacccgtgagccgctttttc

SEQ ID NO: 2463 - RNA, 126 nt, synthetic construct
  source 1..126: mol_type = other RNA
gatccccgaaaaagcgggttgttttagagctagaaatagcaagttaaaataaggctagtccgttatcaacttgaaaaagtggcaccgagtcggtgcgggactacactagggcggagccgctttttc

SEQ ID NO: 2464 - RNA, 121 nt, synthetic construct
  source 1..121: mol_type = other RNA
gatccccgaaaaagcgggttgttttagagctagaaatagcaagttaaaataaggctagtccgttatcaacttgaaaaagtggcaccgagtcggtgcagaacggccaaaggtccgctttttc

SEQ ID NO: 2465 - RNA, 121 nt, synthetic construct
  source 1..121: mol_type = other RNA
gatccccgaaaaagcgggttgttttagagctagaaatagcaagttaaaataaggctagtccgttatcaacttgaaaaagtggcaccgagtcggtgcgtggtccgactcgagccgctttttc

SEQ ID NO: 2466 - RNA, 136 nt, synthetic construct
  source 1..136: mol_type = other RNA
gatccccgaaaaagcgggttgttttagagctagaaatagcaagttaaaataaggctagtccgttatcaacttgaaaaagtggcaccgagtcggtgcgctctttcagcggctaaatcttagagcgagccgctttttc

SEQ ID NO: 2467 - RNA, 116 nt, synthetic construct
  source 1..116: mol_type = other RNA
gatccccgaaaaagcgggttgttttagagctagaaatagcaagttaaaataaggctagtccgttatcaacttgaaaaagtggcaccgagtcggtgcccagtgtcagccgctttttc

SEQ ID NO: 2468 - RNA, 136 nt, synthetic construct
  source 1..136: mol_type = other RNA
gatccccgaaaaagcgggttgttttagagctagaaatagcaagttaaaataaggctagtccgttatcaacttgaaaaagtggcaccgagtcggtgcgacggaggccgggatgccttcgccgctcagccgctttttc

SEQ ID NO: 2469 - RNA, 126 nt, synthetic construct
  source 1..126: mol_type = other RNA
gatccccgaaaaagcgggttgttttagagctagaaatagcaagttaaaataaggctagtccgttatcaacttgaaaaagtggcaccgagtcggtgcggatcgtccctcaggggcagccgctttttc

SEQ ID NO: 2470 - RNA, 116 nt, synthetic construct
  source 1..116: mol_type = other RNA
gatccccgaaaaagcgggttgttttagagctagaaatagcaagttaaaataaggctagtccgttatcaacttgaaaaagtggcaccgagtcggtgcggtgccgcagccgctttttc

SEQ ID NO: 2471 - RNA, 126 nt, synthetic construct
  source 1..126: mol_type = other RNA
gatccccgaaaaagcgggttgttttagagctagaaatagcaagttaaaataaggctagtccgttatcaacttgaaaaagtggcaccgagtcggtgcccttatcatctttaagtttcccgctttttc

SEQ ID NO: 2472 - RNA, 131 nt, synthetic construct
  source 1..131: mol_type = other RNA
gatccccgaaaaagcgggttgttttagagctagaaatagcaagttaaaataaggctagtccgttatcaacttgaaaaagtggcaccgagtcggtgcgccgtcgtggaggcaaggcctgcgtccgctttttc

SEQ ID NO: 2473 - RNA, 128 nt, synthetic construct
  source 1..128: mol_type = other RNA
gatccccgaaaaagcgggttgttttagagctagaaatagcaagttaaaataaggctagtccgttatcaacttgaaaaagtggcaccgagtcggtgccggtccgcgcgcagcgactttcccgctttttc

SEQ ID NO: 2474 - RNA, 124 nt, synthetic construct
  source 1..124: mol_type = other RNA
gatccccgaaaaagcgggttgttttagagctagaaatagcaagttaaaataaggctagtccgttatcaacttgaaaaagtggcaccgagtcggtgcgctacggccggagtgttcccgctttttc

SEQ ID NO: 2475 - RNA, 116 nt, synthetic construct
  source 1..116: mol_type = other RNA
gatccccgaaaaagcgggttgttttagagctagaaatagcaagttaaaataaggctagtccgttatcaacttgaaaaagtggcaccgagtcggtgctttccgcttcccgctttttc

SEQ ID NO: 2476 - RNA, 121 nt, synthetic construct
  source 1..121: mol_type = other RNA
gatccccgaaaaagcgggttgttttagagctagaaatagcaagttaaaataaggctagtccgttatcaacttgaaaaagtggcaccgagtcggtgccgtgccgcgcgtgtcccgctttttc

SEQ ID NO: 2477 - RNA, 141 nt, synthetic construct
  source 1..141: mol_type = other RNA
gatccccgaaaaagcgggttgttttagagctagaaatagcaagttaaaataaggctagtccgttatcaacttgaaaaagtggcaccgagtcggtgctcgagccgcgtgagtcattgtactctacggcggtcccgctttttc

SEQ ID NO: 2478 - RNA, 126 nt, synthetic construct
  source 1..126: mol_type = other RNA
gatccccgaaaaagcgggttgttttagagctagaaatagcaagttaaaataaggctagtccgttatcaacttgaaaaagtggcaccgagtcggtgcggactatccctccatggcgtccgctttttc

SEQ ID NO: 2479 - RNA, 121 nt, synthetic construct
  source 1..121: mol_type = other RNA
gatccccgaaaaagcgggttgttttagagctagaaatagcaagttaaaataaggctagtccgttatcaacttgaaaaagtggcaccgagtcggtgctgctatgctgggctcccgctttttc

SEQ ID NO: 2480 - RNA, 134 nt, synthetic construct
  source 1..134: mol_type = other RNA
gatccccgaaaaagcgggttgttttagagctagaaatagcaagttaaaataaggctagtccgttatcaacttgaaaaagtggcaccgagtcggtgctaggggtcgcctgggtgctcgagggcgtccgctttttc

SEQ ID NO: 2481 - RNA, 131 nt, synthetic construct
  source 1..131: mol_type = other RNA
gatccccgaaaaagcgggttgttttagagctagaaatagcaagttaaaataaggctagtccgttatcaacttgaaaaagtggcaccgagtcggtgccggtaatggcactctaaccgccctcccgctttttc

SEQ ID NO: 2482 - RNA, 126 nt, synthetic construct
  source 1..126: mol_type = other RNA
gatccccgaaaaagcgggttgttttagagctagaaatagcaagttaaaataaggctagtccgttatcaacttgaaaaagtggcaccgagtcggtgcgcggagacagttcttagatcccgctttttc

SEQ ID NO: 2483 - RNA, 121 nt, synthetic construct
  source 1..121: mol_type = other RNA
gatccccgaaaaagcgggttgttttagagctagaaatagcaagttaaaataaggctagtccgttatcaacttgaaaaagtggcaccgagtcggtgcgacgtcgttgtgtgcccgctttttc

SEQ ID NO: 2484 - RNA, 134 nt, synthetic construct
  source 1..134: mol_type = other RNA
gatccccgaaaaagcgggttgttttagagctagaaatagcaagttaaaataaggctagtccgttatcaacttgaaaaagtggcaccgagtcggtgcggatgtccattggaccgcgcttcggtgcccgctttttc

SEQ ID NO: 2485 - RNA, 134 nt, synthetic construct
  source 1..134: mol_type = other RNA
gatccccgaaaaagcgggttgttttagagctagaaatagcaagttaaaataaggctagtccgttatcaacttgaaaaagtggcaccgagtcggtgccggctacgtcccgggacgtgccccgtgcccgctttttc

SEQ ID NO: 2486 - RNA, 121 nt, synthetic construct
  source 1..121: mol_type = other RNA
gatccccgaaaaagcgggttgttttagagctagaaatagcaagttaaaataaggctagtccgttatcaacttgaaaaagtggcaccgagtcggtgctggggtaacgcgcgtccgctttttc

SEQ ID NO: 2487 - RNA, 116 nt, synthetic construct
  source 1..116: mol_type = other RNA
gatccccgaaaaagcgggttgttttagagctagaaatagcaagttaaaataaggctagtccgttatcaacttgaaaaagtggcaccgagtcggtgcctagcactgcccgctttttc

SEQ ID NO: 2488 - RNA, 121 nt, synthetic construct
  source 1..121: mol_type = other RNA
gatccccgaaaaagcgggttgttttagagctagaaatagcaagttaaaataaggctagtccgttatcaacttgaaaaagtggcaccgagtcggtgccctgagcctcgtggcccgctttttc

SEQ ID NO: 2489 - RNA, 116 nt, synthetic construct
  source 1..116: mol_type = other RNA
gatccccgaaaaagcgggttgttttagagctagaaatagcaagttaaaataaggctagtccgttatcaacttgaaaaagtggcaccgagtcggtgcccgcgctggcccgctttttc

SEQ ID NO: 2490 - RNA, 136 nt, synthetic construct
  source 1..136: mol_type = other RNA
gatccccgaaaaagcgggttgttttagagctagaaatagcaagttaaaataaggctagtccgttatcaacttgaaaaagtggcaccgagtcggtgctgcaggaggccgtccgccggacgggtgggcccgctttttc

SEQ ID NO: 2491 - RNA, 126 nt, synthetic construct
  source 1..126: mol_type = other RNA
gatccccgaaaaagcgggttgttttagagctagaaatagcaagttaaaataaggctagtccgttatcaacttgaaaaagtggcaccgagtcggtgcccgcactcggcccgtggggcccgctttttc

SEQ ID NO: 2492 - RNA, 136 nt, synthetic construct
  source 1..136: mol_type = other RNA
gatccccgaaaaagcgggttgttttagagctagaaatagcaagttaaaataaggctagtccgttatcaacttgaaaaagtggcaccgagtcggtgcccggcgccacaggccgtgccgctgcggggcccgctttttc

SEQ ID NO: 2493 - RNA, 128 nt, synthetic construct
  source 1..128: mol_type = other RNA
gatccccgaaaaagcgggttgttttagagctagaaatagcaagttaaaataaggctagtccgttatcaacttgaaaaagtggcaccgagtcggtgcgcgagtgccagtcgcccggggcccgctttttc

SEQ ID NO: 2494 - RNA, 116 nt, synthetic construct
  source 1..116: mol_type = other RNA
gatccccgaaaaagcgggttgttttagagctagaaatagcaagttaaaataaggctagtccgttatcaacttgaaaaagtggcaccgagtcggtgcttgtaggggcccgctttttc

SEQ ID NO: 2495 - RNA, 134 nt, synthetic construct
  source 1..134: mol_type = other RNA
gatccccgaaaaagcgggttgttttagagctagaaatagcaagttaaaataaggctagtccgttatcaacttgaaaaagtggcaccgagtcggtgccgccccgggccggggaggctgagcgggcccgctttttc

SEQ ID NO: 2496 - RNA, 121 nt, synthetic construct
  source 1..121: mol_type = other RNA
gatccccgaaaaagcgggttgttttagagctagaaatagcaagttaaaataaggctagtccgttatcaacttgaaaaagtggcaccgagtcggtgccactacggacagggcccgctttttc

SEQ ID NO: 2497 - RNA, 134 nt, synthetic construct
  source 1..134: mol_type = other RNA
gatccccgaaaaagcgggttgttttagagctagaaatagcaagttaaaataaggctagtccgttatcaacttgaaaaagtggcaccgagtcggtgcccgggaggtggccgttgttgcgcgccgtccgctttttc

SEQ ID NO: 2498 - RNA, 128 nt, synthetic construct
  source 1..128: mol_type = other RNA
gatccccgaaaaagcgggttgttttagagctagaaatagcaagttaaaataaggctagtccgttatcaacttgaaaaagtggcaccgagtcggtgcctcagagcagcactgagtcggcccgctttttc

SEQ ID NO: 2499 - RNA, 128 nt, synthetic construct
  source 1..128: mol_type = other RNA
gatccccgaaaaagcgggttgttttagagctagaaatagcaagttaaaataaggctagtccgttatcaacttgaaaaagtggcaccgagtcggtgcccgcgccgcggaggcgggcggcccgctttttc

SEQ ID NO: 2500 - RNA, 121 nt, synthetic construct
  source 1..121: mol_type = other RNA
gatccccgaaaaagcgggttgttttagagctagaaatagcaagttaaaataaggctagtccgttatcaacttgaaaaagtggcaccgagtcggtgccgaggccagggcggcccgctttttc

SEQ ID NO: 2501 - RNA, 136 nt, synthetic construct
  source 1..136: mol_type = other RNA
gatccccgaaaaagcgggttgttttagagctagaaatagcaagttaaaataaggctagtccgttatcaacttgaaaaagtggcaccgagtcggtgcggccgggcgtcgcggcccggtgcggccggcccgctttttc

SEQ ID NO: 2502 - RNA, 126 nt, synthetic construct
  source 1..126: mol_type = other RNA
gatccccgaaaaagcgggttgttttagagctagaaatagcaagttaaaataaggctagtccgttatcaacttgaaaaagtggcaccgagtcggtgctgagataacaaatgtcccgtccgctttttc

SEQ ID NO: 2503 - RNA, 124 nt, synthetic construct
  source 1..124: mol_type = other RNA
gatccccgaaaaagcgggttgttttagagctagaaatagcaagttaaaataaggctagtccgttatcaacttgaaaaagtggcaccgagtcggtgcccgcgcggaggttacggcccgctttttc

SEQ ID NO: 2504 - RNA, 116 nt, synthetic construct
  source 1..116: mol_type = other RNA
gatccccgaaaaagcgggttgttttagagctagaaatagcaagttaaaataaggctagtccgttatcaacttgaaaaagtggcaccgagtcggtgccagcctaggcccgctttttc

SEQ ID NO: 2505 - RNA, 128 nt, synthetic construct
  source 1..128: mol_type = other RNA
gatccccgaaaaagcgggttgttttagagctagaaatagcaagttaaaataaggctagtccgttatcaacttgaaaaagtggcaccgagtcggtgctgacccgggccgcccgcgaggcccgctttttc

SEQ ID NO: 2506 - RNA, 126 nt, synthetic construct
  source 1..126: mol_type = other RNA
gatccccgaaaaagcgggttgttttagagctagaaatagcaagttaaaataaggctagtccgttatcaacttgaaaaagtggcaccgagtcggtgctcggtgaggcccggccaggcccgctttttc

SEQ ID NO: 2507 - RNA, 136 nt, synthetic construct
  source 1..136: mol_type = other RNA
gatccccgaaaaagcgggttgttttagagctagaaatagcaagttaaaataaggctagtccgttatcaacttgaaaaagtggcaccgagtcggtgcctggacgaggtcgtggcggtcgagtaaggcccgctttttc

SEQ ID NO: 2508 - RNA, 141 nt, synthetic construct
  source 1..141: mol_type = other RNA
gatccccgaaaaagcgggttgttttagagctagaaatagcaagttaaaataaggctagtccgttatcaacttgaaaaagtggcaccgagtcggtgcagtcctcagtaccccgagccgtgacgtcggttcgcccgctttttc

SEQ ID NO: 2509 - RNA, 134 nt, synthetic construct
  source 1..134: mol_type = other RNA
gatccccgaaaaagcgggttgttttagagctagaaatagcaagttaaaataaggctagtccgttatcaacttgaaaaagtggcaccgagtcggtgcggccggccctgcctccgctccggtgcgcccgctttttc

SEQ ID NO: 2510 - RNA, 141 nt, synthetic construct
  source 1..141: mol_type = other RNA
gatccccgaaaaagcgggttgttttagagctagaaatagcaagttaaaataaggctagtccgttatcaacttgaaaaagtggcaccgagtcggtgcgctctcttggcagcggcttccccacttctgggcgcccgctttttc

SEQ ID NO: 2511 - RNA, 146 nt, synthetic construct
  source 1..146: mol_type = other RNA
gatccccgaaaaagcgggttgttttagagctagaaatagcaagttaaaataaggctagtccgttatcaacttgaaaaagtggcaccgagtcggtgcccgcgcgggcacggccgggccgcgcctggcgcgccggcgcccgctttttc

SEQ ID NO: 2512 - RNA, 128 nt, synthetic construct
  source 1..128: mol_type = other RNA
gatccccgaaaaagcgggttgttttagagctagaaatagcaagttaaaataaggctagtccgttatcaacttgaaaaagtggcaccgagtcggtgcacgggcgcggccgcaacggcgcccgctttttc

SEQ ID NO: 2513 - RNA, 136 nt, synthetic construct
  source 1..136: mol_type = other RNA
gatccccgaaaaagcgggttgttttagagctagaaatagcaagttaaaataaggctagtccgttatcaacttgaaaaagtggcaccgagtcggtgcctatcatgcatggcgatcccaggttcgcgcccgctttttc

SEQ ID NO: 2514 - RNA, 124 nt, synthetic construct
  source 1..124: mol_type = other RNA
gatccccgaaaaagcgggttgttttagagctagaaatagcaagttaaaataaggctagtccgttatcaacttgaaaaagtggcaccgagtcggtgcgaggttcccacccgtagtccgctttttc

SEQ ID NO: 2515 - RNA, 146 nt, synthetic construct
  source 1..146: mol_type = other RNA
gatccccgaaaaagcgggttgttttagagctagaaatagcaagttaaaataaggctagtccgttatcaacttgaaaaagtggcaccgagtcggtgccgccccagcccgcgccggcccgcgcccaatgcccgcgcgcccgctttttc

SEQ ID NO: 2516 - RNA, 128 nt, synthetic construct
  source 1..128: mol_type = other RNA
gatccccgaaaaagcgggttgttttagagctagaaatagcaagttaaaataaggctagtccgttatcaacttgaaaaagtggcaccgagtcggtgctggcggactcggtccgtatagtccgctttttc

SEQ ID NO: 2517 - RNA, 124 nt, synthetic construct
  source 1..124: mol_type = other RNA
gatccccgaaaaagcgggttgttttagagctagaaatagcaagttaaaataaggctagtccgttatcaacttgaaaaagtggcaccgagtcggtgccagccccgggacggccgcccgctttttc

SEQ ID NO: 2518 - RNA, 146 nt, synthetic construct
  source 1..146: mol_type = other RNA
gatccccgaaaaagcgggttgttttagagctagaaatagcaagttaaaataaggctagtccgttatcaacttgaaaaagtggcaccgagtcggtgcccgcgaggctcgtcgcgctgccaaactcgccgggccccgcccgctttttc

SEQ ID NO: 2519 - RNA, 128 nt, synthetic construct
  source 1..128: mol_type = other RNA
gatccccgaaaaagcgggttgttttagagctagaaatagcaagttaaaataaggctagtccgttatcaacttgaaaaagtggcaccgagtcggtgcttgatgtcgtaggtgataccgcccgctttttc

SEQ ID NO: 2520 - RNA, 121 nt, synthetic construct
  source 1..121: mol_type = other RNA
gatccccgaaaaagcgggttgttttagagctagaaatagcaagttaaaataaggctagtccgttatcaacttgaaaaagtggcaccgagtcggtgcgcctccgcccaccgcccgctttttc

SEQ ID NO: 2521 - RNA, 131 nt, synthetic construct
  source 1..131: mol_type = other RNA
gatccccgaaaaagcgggttgttttagagctagaaatagcaagttaaaataaggctagtccgttatcaacttgaaaaagtggcaccgagtcggtgccgcgtccgctgccggcgggcgacgcccgctttttc

SEQ ID NO: 2522 - RNA, 124 nt, synthetic construct
  source 1..124: mol_type = other RNA
gatccccgaaaaagcgggttgttttagagctagaaatagcaagttaaaataaggctagtccgttatcaacttgaaaaagtggcaccgagtcggtgcgcagataatcgatagagtccgctttttc

SEQ ID NO: 2523 - RNA, 128 nt, synthetic construct
  source 1..128: mol_type = other RNA
gatccccgaaaaagcgggttgttttagagctagaaatagcaagttaaaataaggctagtccgttatcaacttgaaaaagtggcaccgagtcggtgcattgctcaggcgaacccgtagcccgctttttc

SEQ ID NO: 2524 - RNA, 124 nt, synthetic construct
  source 1..124: mol_type = other RNA
gatccccgaaaaagcgggttgttttagagctagaaatagcaagttaaaataaggctagtccgttatcaacttgaaaaagtggcaccgagtcggtgcgggcggccactggggagcccgctttttc

SEQ ID NO: 2525 - RNA, 126 nt, synthetic construct
  source 1..126: mol_type = other RNA
gatccccgaaaaagcgggttgttttagagctagaaatagcaagttaaaataaggctagtccgttatcaacttgaaaaagtggcaccgagtcggtgccgcgccggccgtcgcccagcccgctttttc

SEQ ID NO: 2526 - RNA, 134 nt, synthetic construct
  source 1..134: mol_type = other RNA
gatccccgaaaaagcgggttgttttagagctagaaatagcaagttaaaataaggctagtccgttatcaacttgaaaaagtggcaccgagtcggtgcgacggcccgcgtgactgcgacccacagcccgctttttc

SEQ ID NO: 2527 - RNA, 121 nt, synthetic construct
  source 1..121: mol_type = other RNA
gatccccgaaaaagcgggttgttttagagctagaaatagcaagttaaaataaggctagtccgttatcaacttgaaaaagtggcaccgagtcggtgcgcggcaagaatgtccccgctttttc

SEQ ID NO: 2528 - RNA, 128 nt, synthetic construct
  source 1..128: mol_type = other RNA
gatccccgaaaaagcgggttgttttagagctagaaatagcaagttaaaataaggctagtccgttatcaacttgaaaaagtggcaccgagtcggtgcatctcgccacggacactggtccccgctttttc

SEQ ID NO: 2529 - RNA, 124 nt, synthetic construct
  source 1..124: mol_type = other RNA
gatccccgaaaaagcgggttgttttagagctagaaatagcaagttaaaataaggctagtccgttatcaacttgaaaaagtggcaccgagtcggtgctacccggcgtccgcgtccccgctttttc

SEQ ID NO: 2530 - RNA, 134 nt, synthetic construct
  source 1..134: mol_type = other RNA
gatccccgaaaaagcgggttgttttagagctagaaatagcaagttaaaataaggctagtccgttatcaacttgaaaaagtggcaccgagtcggtgcctcccctcgtatcgagcgtgatctctccccgctttttc

SEQ ID NO: 2531 - RNA, 141 nt, synthetic construct
  source 1..141: mol_type = other RNA
gatccccgaaaaagcgggttgttttagagctagaaatagcaagttaaaataaggctagtccgttatcaacttgaaaaagtggcaccgagtcggtgcgcatcggacgctgcgacggcgccggccccggcagtccgctttttc

SEQ ID NO: 2532 - RNA, 136 nt, synthetic construct
  source 1..136: mol_type = other RNA
gatccccgaaaaagcgggttgttttagagctagaaatagcaagttaaaataaggctagtccgttatcaacttgaaaaagtggcaccgagtcggtgcaccccacgtatcagcaaagtgcaaccctttccgctttttc

SEQ ID NO: 2533 - RNA, 144 nt, synthetic construct
  source 1..144: mol_type = other RNA
gatccccgaaaaagcgggttgttttagagctagaaatagcaagttaaaataaggctagtccgttatcaacttgaaaaagtggcaccgagtcggtgctgcatgatggtccgatgctgcctgcctcggcctcatccccgctttttc

SEQ ID NO: 2534 - RNA, 141 nt, synthetic construct
  source 1..141: mol_type = other RNA
gatccccgaaaaagcgggttgttttagagctagaaatagcaagttaaaataaggctagtccgttatcaacttgaaaaagtggcaccgagtcggtgctgatttgtgacgggtaaacagataattagccatccccgctttttc

SEQ ID NO: 2535 - RNA, 131 nt, synthetic construct
  source 1..131: mol_type = other RNA
gatccccgaaaaagcgggttgttttagagctagaaatagcaagttaaaataaggctagtccgttatcaacttgaaaaagtggcaccgagtcggtgcgccgccccggggacgtcccgttgccccgctttttc

SEQ ID NO: 2536 - RNA, 121 nt, synthetic construct
  source 1..121: mol_type = other RNA
gatccccgaaaaagcgggttgttttagagctagaaatagcaagttaaaataaggctagtccgttatcaacttgaaaaagtggcaccgagtcggtgcgtatggttaattgccccgctttttc

SEQ ID NO: 2537 - RNA, 136 nt, synthetic construct
  source 1..136: mol_type = other RNA
gatccccgaaaaagcgggttgttttagagctagaaatagcaagttaaaataaggctagtccgttatcaacttgaaaaagtggcaccgagtcggtgcggcgccggcctgggagcccgggcctgggccccgctttttc

SEQ ID NO: 2538 - RNA, 131 nt, synthetic construct
  source 1..131: mol_type = other RNA
gatccccgaaaaagcgggttgttttagagctagaaatagcaagttaaaataaggctagtccgttatcaacttgaaaaagtggcaccgagtcggtgccactgcaccgcttcggtctgcggccccgctttttc

SEQ ID NO: 2539 - RNA, 126 nt, synthetic construct
  source 1..126: mol_type = other RNA
gatccccgaaaaagcgggttgttttagagctagaaatagcaagttaaaataaggctagtccgttatcaacttgaaaaagtggcaccgagtcggtgcccccgccgccccgtccggccccgctttttc

SEQ ID NO: 2540 - RNA, 124 nt, synthetic construct
  source 1..124: mol_type = other RNA
gatccccgaaaaagcgggttgttttagagctagaaatagcaagttaaaataaggctagtccgttatcaacttgaaaaagtggcaccgagtcggtgcaggcctggcgtccaggccccgctttttc

SEQ ID NO: 2541 - RNA, 126 nt, synthetic construct
  source 1..126: mol_type = other RNA
gatccccgaaaaagcgggttgttttagagctagaaatagcaagttaaaataaggctagtccgttatcaacttgaaaaagtggcaccgagtcggtgcctcgtcactggatgtgaagtccgctttttc

SEQ ID NO: 2542 - RNA, 134 nt, synthetic construct
  source 1..134: mol_type = other RNA
gatccccgaaaaagcgggttgttttagagctagaaatagcaagttaaaataaggctagtccgttatcaacttgaaaaagtggcaccgagtcggtgctgctgcccgccgcccgtagccacaggccccgctttttc

SEQ ID NO: 2543 - RNA, 131 nt, synthetic construct
  source 1..131: mol_type = other RNA
gatccccgaaaaagcgggttgttttagagctagaaatagcaagttaaaataaggctagtccgttatcaacttgaaaaagtggcaccgagtcggtgccccggggccttggggctgcctcgccccgctttttc

SEQ ID NO: 2544 - RNA, 128 nt, synthetic construct
  source 1..128: mol_type = other RNA
gatccccgaaaaagcgggttgttttagagctagaaatagcaagttaaaataaggctagtccgttatcaacttgaaaaagtggcaccgagtcggtgcccgatcccggcccgcccgcgccccgctttttc

SEQ ID NO: 2545 - RNA, 141 nt, synthetic construct
  source 1..141: mol_type = other RNA
gatccccgaaaaagcgggttgttttagagctagaaatagcaagttaaaataaggctagtccgttatcaacttgaaaaagtggcaccgagtcggtgccgccaccgggttctccggtacctgcggcttggcccccgctttttc

SEQ ID NO: 2546 - RNA, 126 nt, synthetic construct
  source 1..126: mol_type = other RNA
gatccccgaaaaagcgggttgttttagagctagaaatagcaagttaaaataaggctagtccgttatcaacttgaaaaagtggcaccgagtcggtgccacggccgggccgccgctctccgctttttc

SEQ ID NO: 2547 - RNA, 116 nt, synthetic construct
  source 1..116: mol_type = other RNA
gatccccgaaaaagcgggttgttttagagctagaaatagcaagttaaaataaggctagtccgttatcaacttgaaaaagtggcaccgagtcggtgcagctaggcccccgctttttc

SEQ ID NO: 2548 - RNA, 126 nt, synthetic construct
  source 1..126: mol_type = other RNA
gatccccgaaaaagcgggttgttttagagctagaaatagcaagttaaaataaggctagtccgttatcaacttgaaaaagtggcaccgagtcggtgccgtcgatgggtccgacgcccccgctttttc

SEQ ID NO: 2549 - RNA, 128 nt, synthetic construct
  source 1..128: mol_type = other RNA
gatccccgaaaaagcgggttgttttagagctagaaatagcaagttaaaataaggctagtccgttatcaacttgaaaaagtggcaccgagtcggtgcccggcccctgaggccgggccccccgctttttc

SEQ ID NO: 2550 - RNA, 134 nt, synthetic construct
  source 1..134: mol_type = other RNA
gatccccgaaaaagcgggttgttttagagctagaaatagcaagttaaaataaggctagtccgttatcaacttgaaaaagtggcaccgagtcggtgccgcgggagccggccgccggcgccgccccccgctttttc

SEQ ID NO: 2551 - RNA, 129 nt, synthetic construct
  source 1..129: mol_type = other RNA
gatccccgaaaaagcgggttgttttagagctagaaatagcaagttaaaataaggctagtccgttatcaacttgaaaaagtggcaccgagtcggtgctcgtggtctcgggcatcagacccccgctttttc

SEQ ID NO: 2552 - RNA, 136 nt, synthetic construct
  source 1..136: mol_type = other RNA
gatccccgaaaaagcgggttgttttagagctagaaatagcaagttaaaataaggctagtccgttatcaacttgaaaaagtggcaccgagtcggtgcgtgtctcatgtttccttgtattacgttaccccgctttttc

SEQ ID NO: 2553 - RNA, 136 nt, synthetic construct
  source 1..136: mol_type = other RNA
gatccccgaaaaagcgggttgttttagagctagaaatagcaagttaaaataaggctagtccgttatcaacttgaaaaagtggcaccgagtcggtgcagtgtttaccttatctgcttacgtagtaccccgctttttc

SEQ ID NO: 2554 - RNA, 141 nt, synthetic construct
  source 1..141: mol_type = other RNA
gatccccgaaaaagcgggttgttttagagctagaaatagcaagttaaaataaggctagtccgttatcaacttgaaaaagtggcaccgagtcggtgcgatatgatactgaacgcccctagtgccaatggaccccgctttttc

SEQ ID NO: 2555 - RNA, 146 nt, synthetic construct
  source 1..146: mol_type = other RNA
gatccccgaaaaagcgggttgttttagagctagaaatagcaagttaaaataaggctagtccgttatcaacttgaaaaagtggcaccgagtcggtgcgcggccttaagttcgctctcaccccgtcgtcaccaggaccccgctttttc

SEQ ID NO: 2556 - RNA, 141 nt, synthetic construct
  source 1..141: mol_type = other RNA
gatccccgaaaaagcgggttgttttagagctagaaatagcaagttaaaataaggctagtccgttatcaacttgaaaaagtggcaccgagtcggtgcccggggaacggcttccccggcggcccggctcgtacccgctttttc

SEQ ID NO: 2557 - RNA, 116 nt, synthetic construct
  source 1..116: mol_type = other RNA
gatccccgaaaaagcgggttgttttagagctagaaatagcaagttaaaataaggctagtccgttatcaacttgaaaaagtggcaccgagtcggtgcgaagccgtacccgctttttc

SEQ ID NO: 2558 - RNA, 126 nt, synthetic construct
  source 1..126: mol_type = other RNA
gatccccgaaaaagcgggttgttttagagctagaaatagcaagttaaaataaggctagtccgttatcaacttgaaaaagtggcaccgagtcggtgctatatgcattaccccgatacccgctttttc

SEQ ID NO: 2559 - RNA, 121 nt, synthetic construct
  source 1..121: mol_type = other RNA
gatccccgaaaaagcgggttgttttagagctagaaatagcaagttaaaataaggctagtccgttatcaacttgaaaaagtggcaccgagtcggtgcaggcgcgtaggtgacccgctttttc

SEQ ID NO: 2560 - RNA, 131 nt, synthetic construct
  source 1..131: mol_type = other RNA
gatccccgaaaaagcgggttgttttagagctagaaatagcaagttaaaataaggctagtccgttatcaacttgaaaaagtggcaccgagtcggtgcggaggctcgcaccgaaatcagcgacccgctttttc

SEQ ID NO: 2561 - RNA, 141 nt, synthetic construct
  source 1..141: mol_type = other RNA
gatccccgaaaaagcgggttgttttagagctagaaatagcaagttaaaataaggctagtccgttatcaacttgaaaaagtggcaccgagtcggtgctcggcgccccgggcgtggccggcgtgcaggccgacccgctttttc

SEQ ID NO: 2562 - RNA, 134 nt, synthetic construct
  source 1..134: mol_type = other RNA
gatccccgaaaaagcgggttgttttagagctagaaatagcaagttaaaataaggctagtccgttatcaacttgaaaaagtggcaccgagtcggtgccccgtgccctcggtcacgccgacttcacccgctttttc

SEQ ID NO: 2563 - RNA, 136 nt, synthetic construct
  source 1..136: mol_type = other RNA
gatccccgaaaaagcgggttgttttagagctagaaatagcaagttaaaataaggctagtccgttatcaacttgaaaaagtggcaccgagtcggtgccgggaggctggggcgcggggcccggcgcacccgctttttc

SEQ ID NO: 2564 - RNA, 131 nt, synthetic construct
  source 1..131: mol_type = other RNA
gatccccgaaaaagcgggttgttttagagctagaaatagcaagttaaaataaggctagtccgttatcaacttgaaaaagtggcaccgagtcggtgcgggccgtgggagcctccgtcaccacccgctttttc

SEQ ID NO: 2565 - RNA, 121 nt, synthetic construct
  source 1..121: mol_type = other RNA
gatccccgaaaaagcgggttgttttagagctagaaatagcaagttaaaataaggctagtccgttatcaacttgaaaaagtggcaccgagtcggtgcagctacttgtgtaacccgctttttc

SEQ ID NO: 2566 - RNA, 128 nt, synthetic construct
  source 1..128: mol_type = other RNA
gatccccgaaaaagcgggttgttttagagctagaaatagcaagttaaaataaggctagtccgttatcaacttgaaaaagtggcaccgagtcggtgccccgtaacgcccacccgcgaacccgctttttc

SEQ ID NO: 2567 - RNA, 128 nt, synthetic construct
  source 1..128: mol_type = other RNA
gatccccgaaaaagcgggttgttttagagctagaaatagcaagttaaaataaggctagtccgttatcaacttgaaaaagtggcaccgagtcggtgcatgagtccaggccatgtgaaacccgctttttc

SEQ ID NO: 2568 - RNA, 136 nt, synthetic construct
  source 1..136: mol_type = other RNA
gatccccgaaaaagcgggttgttttagagctagaaatagcaagttaaaataaggctagtccgttatcaacttgaaaaagtggcaccgagtcggtgcgatttgataatctcgtatatagagcagttaccgctttttc

SEQ ID NO: 2569 - RNA, 124 nt, synthetic construct
  source 1..124: mol_type = other RNA
gatccccgaaaaagcgggttgttttagagctagaaatagcaagttaaaataaggctagtccgttatcaacttgaaaaagtggcaccgagtcggtgcaaagtctcatttgacttaccgctttttc

SEQ ID NO: 2570 - RNA, 124 nt, synthetic construct
  source 1..124: mol_type = other RNA
gatccccgaaaaagcgggttgttttagagctagaaatagcaagttaaaataaggctagtccgttatcaacttgaaaaagtggcaccgagtcggtgccgccggagcggccgggtaccgctttttc

SEQ ID NO: 2571 - RNA, 146 nt, synthetic construct
  source 1..146: mol_type = other RNA
gatccccgaaaaagcgggttgttttagagctagaaatagcaagttaaaataaggctagtccgttatcaacttgaaaaagtggcaccgagtcggtgcttccatagctaacgtatttggtaattacattcaagaagtaccgctttttc

SEQ ID NO: 2572 - RNA, 141 nt, synthetic construct
  source 1..141: mol_type = other RNA
gatccccgaaaaagcgggttgttttagagctagaaatagcaagttaaaataaggctagtccgttatcaacttgaaaaagtggcaccgagtcggtgcagcttgagatgacagtgatctcggaaattgatctaccgctttttc

SEQ ID NO: 2573 - RNA, 134 nt, synthetic construct
  source 1..134: mol_type = other RNA
gatccccgaaaaagcgggttgttttagagctagaaatagcaagttaaaataaggctagtccgttatcaacttgaaaaagtggcaccgagtcggtgcctagaatgacttatgcgatagagtgctaccgctttttc

SEQ ID NO: 2574 - RNA, 134 nt, synthetic construct
  source 1..134: mol_type = other RNA
gatccccgaaaaagcgggttgttttagagctagaaatagcaagttaaaataaggctagtccgttatcaacttgaaaaagtggcaccgagtcggtgccgcccaggtccaataggtgaaatatgctccgctttttc

SEQ ID NO: 2575 - RNA, 128 nt, synthetic construct
  source 1..128: mol_type = other RNA
gatccccgaaaaagcgggttgttttagagctagaaatagcaagttaaaataaggctagtccgttatcaacttgaaaaagtggcaccgagtcggtgctgtgcaacttcattgttagataccgctttttc

SEQ ID NO: 2576 - RNA, 141 nt, synthetic construct
  source 1..141: mol_type = other RNA
gatccccgaaaaagcgggttgttttagagctagaaatagcaagttaaaataaggctagtccgttatcaacttgaaaaagtggcaccgagtcggtgcgataatctttaacaacgtgaagaattcatgtttgaccgctttttc

SEQ ID NO: 2577 - RNA, 136 nt, synthetic construct
  source 1..136: mol_type = other RNA
gatccccgaaaaagcgggttgttttagagctagaaatagcaagttaaaataaggctagtccgttatcaacttgaaaaagtggcaccgagtcggtgcggattccggtacccgcggggtggccttggaccgctttttc

SEQ ID NO: 2578 - RNA, 141 nt, synthetic construct
  source 1..141: mol_type = other RNA
gatccccgaaaaagcgggttgttttagagctagaaatagcaagttaaaataaggctagtccgttatcaacttgaaaaagtggcaccgagtcggtgccgttctggcgagccgcgcggcgtgccgggaggggaccgctttttc

SEQ ID NO: 2579 - RNA, 146 nt, synthetic construct
  source 1..146: mol_type = other RNA
gatccccgaaaaagcgggttgttttagagctagaaatagcaagttaaaataaggctagtccgttatcaacttgaaaaagtggcaccgagtcggtgcgcacatgtccacgccagcagcgccaggtggcggacagggaccgctttttc

SEQ ID NO: 2580 - RNA, 128 nt, synthetic construct
  source 1..128: mol_type = other RNA
gatccccgaaaaagcgggttgttttagagctagaaatagcaagttaaaataaggctagtccgttatcaacttgaaaaagtggcaccgagtcggtgccgtgggtcgtccgctgttaggaccgctttttc

SEQ ID NO: 2581 - RNA, 136 nt, synthetic construct
  source 1..136: mol_type = other RNA
gatccccgaaaaagcgggttgttttagagctagaaatagcaagttaaaataaggctagtccgttatcaacttgaaaaagtggcaccgagtcggtgcccggctcgcaggctgggccgataccgtcgaccgctttttc

SEQ ID NO: 2582 - RNA, 126 nt, synthetic construct
  source 1..126: mol_type = other RNA
gatccccgaaaaagcgggttgttttagagctagaaatagcaagttaaaataaggctagtccgttatcaacttgaaaaagtggcaccgagtcggtgcccgaggtctagggtgtccgaccgctttttc

SEQ ID NO: 2583 - RNA, 124 nt, synthetic construct
  source 1..124: mol_type = other RNA
gatccccgaaaaagcgggttgttttagagctagaaatagcaagttaaaataaggctagtccgttatcaacttgaaaaagtggcaccgagtcggtgcgcgtgtaacgcgcgggctccgctttttc

SEQ ID NO: 2584 - RNA, 124 nt, synthetic construct
  source 1..124: mol_type = other RNA
gatccccgaaaaagcgggttgttttagagctagaaatagcaagttaaaataaggctagtccgttatcaacttgaaaaagtggcaccgagtcggtgcaggcggaagaccggccgaccgctttttc

SEQ ID NO: 2585 - RNA, 131 nt, synthetic construct
  source 1..131: mol_type = other RNA
gatccccgaaaaagcgggttgttttagagctagaaatagcaagttaaaataaggctagtccgttatcaacttgaaaaagtggcaccgagtcggtgccccggcgcctgagcccggccgccgaccgctttttc

SEQ ID NO: 2586 - RNA, 121 nt, synthetic construct
  source 1..121: mol_type = other RNA
gatccccgaaaaagcgggttgttttagagctagaaatagcaagttaaaataaggctagtccgttatcaacttgaaaaagtggcaccgagtcggtgcgcggattgaacacgaccgctttttc

SEQ ID NO: 2587 - RNA, 134 nt, synthetic construct
  source 1..134: mol_type = other RNA
gatccccgaaaaagcgggttgttttagagctagaaatagcaagttaaaataaggctagtccgttatcaacttgaaaaagtggcaccgagtcggtgctatagtgtgttgattccatcgttgcagaccgctttttc

SEQ ID NO: 2588 - RNA, 124 nt, synthetic construct
  source 1..124: mol_type = other RNA
gatccccgaaaaagcgggttgttttagagctagaaatagcaagttaaaataaggctagtccgttatcaacttgaaaaagtggcaccgagtcggtgcacccaagaggagggcagaccgctttttc

SEQ ID NO: 2589 - RNA, 131 nt, synthetic construct
  source 1..131: mol_type = other RNA
gatccccgaaaaagcgggttgttttagagctagaaatagcaagttaaaataaggctagtccgttatcaacttgaaaaagtggcaccgagtcggtgcaagctcctcaattccattcacaagaccgctttttc

SEQ ID NO: 2590 - RNA, 128 nt, synthetic construct
  source 1..128: mol_type = other RNA
gatccccgaaaaagcgggttgttttagagctagaaatagcaagttaaaataaggctagtccgttatcaacttgaaaaagtggcaccgagtcggtgcccaccgcggcccggggcaggctccgctttttc

SEQ ID NO: 2591 - RNA, 131 nt, synthetic construct
  source 1..131: mol_type = other RNA
gatccccgaaaaagcgggttgttttagagctagaaatagcaagttaaaataaggctagtccgttatcaacttgaaaaagtggcaccgagtcggtgcgaaagtaattacaccttacctatcaccgctttttc

SEQ ID NO: 2592 - RNA, 126 nt, synthetic construct
  source 1..126: mol_type = other RNA
gatccccgaaaaagcgggttgttttagagctagaaatagcaagttaaaataaggctagtccgttatcaacttgaaaaagtggcaccgagtcggtgcgcctgagattcgaagccgctccgctttttc

SEQ ID NO: 2593 - RNA, 121 nt, synthetic construct
  source 1..121: mol_type = other RNA
gatccccgaaaaagcgggttgttttagagctagaaatagcaagttaaaataaggctagtccgttatcaacttgaaaaagtggcaccgagtcggtgctcggccccgcgtgcaccgctttttc

SEQ ID NO: 2594 - RNA, 131 nt, synthetic construct
  source 1..131: mol_type = other RNA
gatccccgaaaaagcgggttgttttagagctagaaatagcaagttaaaataaggctagtccgttatcaacttgaaaaagtggcaccgagtcggtgccgtagggcttcagtgtacccgtgcaccgctttttc

SEQ ID NO: 2595 - RNA, 121 nt, synthetic construct
  source 1..121: mol_type = other RNA
gatccccgaaaaagcgggttgttttagagctagaaatagcaagttaaaataaggctagtccgttatcaacttgaaaaagtggcaccgagtcggtgcagccgccgtgcggcaccgctttttc

SEQ ID NO: 2596 - RNA, 126 nt, synthetic construct
  source 1..126: mol_type = other RNA
gatccccgaaaaagcgggttgttttagagctagaaatagcaagttaaaataaggctagtccgttatcaacttgaaaaagtggcaccgagtcggtgccctatacacggccgcccgcaccgctttttc

SEQ ID NO: 2597 - RNA, 121 nt, synthetic construct
  source 1..121: mol_type = other RNA
gatccccgaaaaagcgggttgttttagagctagaaatagcaagttaaaataaggctagtccgttatcaacttgaaaaagtggcaccgagtcggtgccctcggtgacccgcaccgctttttc

SEQ ID NO: 2598 - RNA, 116 nt, synthetic construct
  source 1..116: mol_type = other RNA
gatccccgaaaaagcgggttgttttagagctagaaatagcaagttaaaataaggctagtccgttatcaacttgaaaaagtggcaccgagtcggtgcggtccccgctccgctttttc

SEQ ID NO: 2599 - RNA, 131 nt, synthetic construct
  source 1..131: mol_type = other RNA
gatccccgaaaaagcgggttgttttagagctagaaatagcaagttaaaataaggctagtccgttatcaacttgaaaaagtggcaccgagtcggtgcgtgtggagctatctaggaatacgcaccgctttttc

SEQ ID NO: 2600 - RNA, 128 nt, synthetic construct
  source 1..128: mol_type = other RNA
gatccccgaaaaagcgggttgttttagagctagaaatagcaagttaaaataaggctagtccgttatcaacttgaaaaagtggcaccgagtcggtgcgccccacgccacggcatttccaccgctttttc

SEQ ID NO: 2601 - RNA, 136 nt, synthetic construct
  source 1..136: mol_type = other RNA
gatccccgaaaaagcgggttgttttagagctagaaatagcaagttaaaataaggctagtccgttatcaacttgaaaaagtggcaccgagtcggtgcgcgagctagggccaagcctgtggcggtccaccgctttttc

SEQ ID NO: 2602 - RNA, 124 nt, synthetic construct
  source 1..124: mol_type = other RNA
gatccccgaaaaagcgggttgttttagagctagaaatagcaagttaaaataaggctagtccgttatcaacttgaaaaagtggcaccgagtcggtgcgacgacataagtaccccaccgctttttc

SEQ ID NO: 2603 - RNA, 126 nt, synthetic construct
  source 1..126: mol_type = other RNA
gatccccgaaaaagcgggttgttttagagctagaaatagcaagttaaaataaggctagtccgttatcaacttgaaaaagtggcaccgagtcggtgccccggaatccggccgtaccaccgctttttc

SEQ ID NO: 2604 - RNA, 131 nt, synthetic construct
  source 1..131: mol_type = other RNA
gatccccgaaaaagcgggttgttttagagctagaaatagcaagttaaaataaggctagtccgttatcaacttgaaaaagtggcaccgagtcggtgcccgaggccgaaaccggaaactaccaccgctttttc

SEQ ID NO: 2605 - RNA, 116 nt, synthetic construct
  source 1..116: mol_type = other RNA
gatccccgaaaaagcgggttgttttagagctagaaatagcaagttaaaataaggctagtccgttatcaacttgaaaaagtggcaccgagtcggtgcccggcggacaccgctttttc

SEQ ID NO: 2606 - RNA, 126 nt, synthetic construct
  source 1..126: mol_type = other RNA
gatccccgaaaaagcgggttgttttagagctagaaatagcaagttaaaataaggctagtccgttatcaacttgaaaaagtggcaccgagtcggtgcgtgccggagcgcgggccacaccgctttttc

SEQ ID NO: 2607 - RNA, 141 nt, synthetic construct
  source 1..141: mol_type = other RNA
gatccccgaaaaagcgggttgttttagagctagaaatagcaagttaaaataaggctagtccgttatcaacttgaaaaagtggcaccgagtcggtgcacgtgcgcgctcaatactcaatgtaacgtcccacaccgctttttc

SEQ ID NO: 2608 - RNA, 141 nt, synthetic construct
  source 1..141: mol_type = other RNA
gatccccgaaaaagcgggttgttttagagctagaaatagcaagttaaaataaggctagtccgttatcaacttgaaaaagtggcaccgagtcggtgctggtgacagcaccaggtcatggcgttaagtcaacaccgctttttc

SEQ ID NO: 2609 - RNA, 131 nt, synthetic construct
  source 1..131: mol_type = other RNA
gatccccgaaaaagcgggttgttttagagctagaaatagcaagttaaaataaggctagtccgttatcaacttgaaaaagtggcaccgagtcggtgcccttaagcgttattgtcccctttaaccgctttttc

SEQ ID NO: 2610 - RNA, 134 nt, synthetic construct
  source 1..134: mol_type = other RNA
gatccccgaaaaagcgggttgttttagagctagaaatagcaagttaaaataaggctagtccgttatcaacttgaaaaagtggcaccgagtcggtgcctaagatgtagcccttggtaataggtaaccgctttttc

SEQ ID NO: 2611 - RNA, 144 nt, synthetic construct
  source 1..144: mol_type = other RNA
gatccccgaaaaagcgggttgttttagagctagaaatagcaagttaaaataaggctagtccgttatcaacttgaaaaagtggcaccgagtcggtgcttgccgcacgccgagccttctctacgggcccgggcgaaccgctttttc

SEQ ID NO: 2612 - RNA, 124 nt, synthetic construct
  source 1..124: mol_type = other RNA
gatccccgaaaaagcgggttgttttagagctagaaatagcaagttaaaataaggctagtccgttatcaacttgaaaaagtggcaccgagtcggtgctcagaaaccggcgtagaaccgctttttc

SEQ ID NO: 2613 - RNA, 141 nt, synthetic construct
  source 1..141: mol_type = other RNA
gatccccgaaaaagcgggttgttttagagctagaaatagcaagttaaaataaggctagtccgttatcaacttgaaaaagtggcaccgagtcggtgctatcagcggtacccttaacaaagtctctttgagaaccgctttttc

SEQ ID NO: 2614 - RNA, 131 nt, synthetic construct
  source 1..131: mol_type = other RNA
gatccccgaaaaagcgggttgttttagagctagaaatagcaagttaaaataaggctagtccgttatcaacttgaaaaagtggcaccgagtcggtgccgggccgcacccgacaccaccgcaaccgctttttc

SEQ ID NO: 2615 - RNA, 124 nt, synthetic construct
  source 1..124: mol_type = other RNA
gatccccgaaaaagcgggttgttttagagctagaaatagcaagttaaaataaggctagtccgttatcaacttgaaaaagtggcaccgagtcggtgcgtacatggcagagagcaaccgctttttc

SEQ ID NO: 2616 - RNA, 128 nt, synthetic construct
  source 1..128: mol_type = other RNA
gatccccgaaaaagcgggttgttttagagctagaaatagcaagttaaaataaggctagtccgttatcaacttgaaaaagtggcaccgagtcggtgctcatacacagagcaaactccaaccgctttttc

SEQ ID NO: 2617 - RNA, 126 nt, synthetic construct
  source 1..126: mol_type = other RNA
gatccccgaaaaagcgggttgttttagagctagaaatagcaagttaaaataaggctagtccgttatcaacttgaaaaagtggcaccgagtcggtgcacagcaccatctagtgtaaaccgctttttc

SEQ ID NO: 2618 - RNA, 134 nt, synthetic construct
  source 1..134: mol_type = other RNA
gatccccgaaaaagcgggttgttttagagctagaaatagcaagttaaaataaggctagtccgttatcaacttgaaaaagtggcaccgagtcggtgcccgcccgtcgtggaggcgggctgcagctccgctttttc

SEQ ID NO: 2619 - RNA, 128 nt, synthetic construct
  source 1..128: mol_type = other RNA
gatccccgaaaaagcgggttgttttagagctagaaatagcaagttaaaataaggctagtccgttatcaacttgaaaaagtggcaccgagtcggtgctgcccgatctgcgcgccggaaaccgctttttc

SEQ ID NO: 2620 - RNA, 128 nt, synthetic construct
  source 1..128: mol_type = other RNA
gatccccgaaaaagcgggttgttttagagctagaaatagcaagttaaaataaggctagtccgttatcaacttgaaaaagtggcaccgagtcggtgctcttctagcacttgatgttcctccgctttttc

SEQ ID NO: 2621 - RNA, 121 nt, synthetic construct
  source 1..121: mol_type = other RNA
gatccccgaaaaagcgggttgttttagagctagaaatagcaagttaaaataaggctagtccgttatcaacttgaaaaagtggcaccgagtcggtgccaaatcgatgatcctccgctttttc

SEQ ID NO: 2622 - RNA, 136 nt, synthetic construct
  source 1..136: mol_type = other RNA
gatccccgaaaaagcgggttgttttagagctagaaatagcaagttaaaataaggctagtccgttatcaacttgaaaaagtggcaccgagtcggtgcccatatcaatcggggcccaggcggtgtcttccgctttttc

SEQ ID NO: 2623 - RNA, 128 nt, synthetic construct
  source 1..128: mol_type = other RNA
gatccccgaaaaagcgggttgttttagagctagaaatagcaagttaaaataaggctagtccgttatcaacttgaaaaagtggcaccgagtcggtgcgggtcgttattctacccatcctccgctttttc

SEQ ID NO: 2624 - RNA, 128 nt, synthetic construct
  source 1..128: mol_type = other RNA
gatccccgaaaaagcgggttgttttagagctagaaatagcaagttaaaataaggctagtccgttatcaacttgaaaaagtggcaccgagtcggtgcttatgatgtgcgtggtatgactccgctttttc

SEQ ID NO: 2625 - RNA, 134 nt, synthetic construct
  source 1..134: mol_type = other RNA
gatccccgaaaaagcgggttgttttagagctagaaatagcaagttaaaataaggctagtccgttatcaacttgaaaaagtggcaccgagtcggtgctcggcggacggaccgctgcgcagggcttccgctttttc

SEQ ID NO: 2626 - RNA, 121 nt, synthetic construct
  source 1..121: mol_type = other RNA
gatccccgaaaaagcgggttgttttagagctagaaatagcaagttaaaataaggctagtccgttatcaacttgaaaaagtggcaccgagtcggtgcaagcagctcacttaaccgctttttc

SEQ ID NO: 2627 - RNA, 131 nt, synthetic construct
  source 1..131: mol_type = other RNA
gatccccgaaaaagcgggttgttttagagctagaaatagcaagttaaaataaggctagtccgttatcaacttgaaaaagtggcaccgagtcggtgcaaggtaaggtgcacaaacaccttgcccgctttttc

SEQ ID NO: 2628 - RNA, 136 nt, synthetic construct
  source 1..136: mol_type = other RNA
gatccccgaaaaagcgggttgttttagagctagaaatagcaagttaaaataaggctagtccgttatcaacttgaaaaagtggcaccgagtcggtgcacatggagaacagaatatctcttgtgcagaccgctttttc

SEQ ID NO: 2629 - RNA, 131 nt, synthetic construct
  source 1..131: mol_type = other RNA
gatccccgaaaaagcgggttgttttagagctagaaatagcaagttaaaataaggctagtccgttatcaacttgaaaaagtggcaccgagtcggtgcaccacgacctatatgtgatcctttaccgctttttc

SEQ ID NO: 2630 - RNA, 126 nt, synthetic construct
  source 1..126: mol_type = other RNA
gatccccgaaaaagcgggttgttttagagctagaaatagcaagttaaaataaggctagtccgttatcaacttgaaaaagtggcaccgagtcggtgcaccagccggcttccgccggcccgctttttc

SEQ ID NO: 2631 - RNA, 136 nt, synthetic construct
  source 1..136: mol_type = other RNA
gatccccgaaaaagcgggttgttttagagctagaaatagcaagttaaaataaggctagtccgttatcaacttgaaaaagtggcaccgagtcggtgcacccgtgggagtgtcgagcacttggatcacccgctttttc

SEQ ID NO: 2632 - RNA, 131 nt, synthetic construct
  source 1..131: mol_type = other RNA
gatccccgaaaaagcgggttgttttagagctagaaatagcaagttaaaataaggctagtccgttatcaacttgaaaaagtggcaccgagtcggtgcacgaggcggcccttgcgccgcacccccgctttttc

SEQ ID NO: 2633 - RNA, 121 nt, synthetic construct
  source 1..121: mol_type = other RNA
gatccccgaaaaagcgggttgttttagagctagaaatagcaagttaaaataaggctagtccgttatcaacttgaaaaagtggcaccgagtcggtgcacgccgatagggcaaccgctttttc

SEQ ID NO: 2634 - RNA, 131 nt, synthetic construct
  source 1..131: mol_type = other RNA
gatccccgaaaaagcgggttgttttagagctagaaatagcaagttaaaataaggctagtccgttatcaacttgaaaaagtggcaccgagtcggtgcactggggcgctgcgtactcccctccccgctttttc

SEQ ID NO: 2635 - RNA, 121 nt, synthetic construct
  source 1..121: mol_type = other RNA
gatccccgaaaaagcgggttgttttagagctagaaatagcaagttaaaataaggctagtccgttatcaacttgaaaaagtggcaccgagtcggtgcagcccatgccccggcccgctttttc

SEQ ID NO: 2636 - RNA, 126 nt, synthetic construct
  source 1..126: mol_type = other RNA
gatccccgaaaaagcgggttgttttagagctagaaatagcaagttaaaataaggctagtccgttatcaacttgaaaaagtggcaccgagtcggtgcagctcactataatctgagctccgctttttc

SEQ ID NO: 2637 - RNA, 126 nt, synthetic construct
  source 1..126: mol_type = other RNA
gatccccgaaaaagcgggttgttttagagctagaaatagcaagttaaaataaggctagtccgttatcaacttgaaaaagtggcaccgagtcggtgcatcagcgtcttgcctggaccccgctttttc

SEQ ID NO: 2638 - RNA, 121 nt, synthetic construct
  source 1..121: mol_type = other RNA
gatccccgaaaaagcgggttgttttagagctagaaatagcaagttaaaataaggctagtccgttatcaacttgaaaaagtggcaccgagtcggtgcatctgcgtagttactccgctttttc

SEQ ID NO: 2639 - RNA, 121 nt, synthetic construct
  source 1..121: mol_type = other RNA
gatccccgaaaaagcgggttgttttagagctagaaatagcaagttaaaataaggctagtccgttatcaacttgaaaaagtggcaccgagtcggtgcatgccaatggggcaaccgctttttc

SEQ ID NO: 2640 - RNA, 136 nt, synthetic construct
  source 1..136: mol_type = other RNA
gatccccgaaaaagcgggttgttttagagctagaaatagcaagttaaaataaggctagtccgttatcaacttgaaaaagtggcaccgagtcggtgcattcatgtgttcgattctccctcgggcacaccgctttttc

SEQ ID NO: 2641 - RNA, 136 nt, synthetic construct
  source 1..136: mol_type = other RNA
gatccccgaaaaagcgggttgttttagagctagaaatagcaagttaaaataaggctagtccgttatcaacttgaaaaagtggcaccgagtcggtgccgacaggagcgtcgcacacgctcggtctccccgctttttc

SEQ ID NO: 2642 - RNA, 131 nt, synthetic construct
  source 1..131: mol_type = other RNA
gatccccgaaaaagcgggttgttttagagctagaaatagcaagttaaaataaggctagtccgttatcaacttgaaaaagtggcaccgagtcggtgccgccccgatcctcgtggccgctcggccgctttttc

SEQ ID NO: 2643 - RNA, 131 nt, synthetic construct
  source 1..131: mol_type = other RNA
gatccccgaaaaagcgggttgttttagagctagaaatagcaagttaaaataaggctagtccgttatcaacttgaaaaagtggcaccgagtcggtgccgctccgcgaggaacccctccttcgccgctttttc

SEQ ID NO: 2644 - RNA, 136 nt, synthetic construct
  source 1..136: mol_type = other RNA
gatccccgaaaaagcgggttgttttagagctagaaatagcaagttaaaataaggctagtccgttatcaacttgaaaaagtggcaccgagtcggtgccggagatcttgctaagacaaatgcaagattccgctttttc

SEQ ID NO: 2645 - RNA, 136 nt, synthetic construct
  source 1..136: mol_type = other RNA
gatccccgaaaaagcgggttgttttagagctagaaatagcaagttaaaataaggctagtccgttatcaacttgaaaaagtggcaccgagtcggtgcgagggcgaacgacccgtccctctgcgggttccgctttttc

SEQ ID NO: 2646 - RNA, 121 nt, synthetic construct
  source 1..121: mol_type = other RNA
gatccccgaaaaagcgggttgttttagagctagaaatagcaagttaaaataaggctagtccgttatcaacttgaaaaagtggcaccgagtcggtgcgagtgcgatgcacagccgctttttc

SEQ ID NO: 2647 - RNA, 136 nt, synthetic construct
  source 1..136: mol_type = other RNA
gatccccgaaaaagcgggttgttttagagctagaaatagcaagttaaaataaggctagtccgttatcaacttgaaaaagtggcaccgagtcggtgcgcatgatgtgagatccaacgtttattcttcccgctttttc

SEQ ID NO: 2648 - RNA, 131 nt, synthetic construct
  source 1..131: mol_type = other RNA
gatccccgaaaaagcgggttgttttagagctagaaatagcaagttaaaataaggctagtccgttatcaacttgaaaaagtggcaccgagtcggtgcggcgaagcatagagtctccgcttccccgctttttc

SEQ ID NO: 2649 - RNA, 126 nt, synthetic construct
  source 1..126: mol_type = other RNA
gatccccgaaaaagcgggttgttttagagctagaaatagcaagttaaaataaggctagtccgttatcaacttgaaaaagtggcaccgagtcggtgcgggaccccggtgtcccctttccgctttttc

SEQ ID NO: 2650 - RNA, 136 nt, synthetic construct
  source 1..136: mol_type = other RNA
gatccccgaaaaagcgggttgttttagagctagaaatagcaagttaaaataaggctagtccgttatcaacttgaaaaagtggcaccgagtcggtgcgggcccggtccacctgggaccttcggcgccccgctttttc

SEQ ID NO: 2651 - RNA, 126 nt, synthetic construct
  source 1..126: mol_type = other RNA
gatccccgaaaaagcgggttgttttagagctagaaatagcaagttaaaataaggctagtccgttatcaacttgaaaaagtggcaccgagtcggtgcggtcgcaactgtgtgcacctccgctttttc

SEQ ID NO: 2652 - RNA, 121 nt, synthetic construct
  source 1..121: mol_type = other RNA
gatccccgaaaaagcgggttgttttagagctagaaatagcaagttaaaataaggctagtccgttatcaacttgaaaaagtggcaccgagtcggtgcggtcgggagtgacctccgctttttc

SEQ ID NO: 2653 - RNA, 121 nt, synthetic construct
  source 1..121: mol_type = other RNA
gatccccgaaaaagcgggttgttttagagctagaaatagcaagttaaaataaggctagtccgttatcaacttgaaaaagtggcaccgagtcggtgcgtgcgcctgtggcgcccgctttttc

SEQ ID NO: 2654 - RNA, 131 nt, synthetic construct
  source 1..131: mol_type = other RNA
gatccccgaaaaagcgggttgttttagagctagaaatagcaagttaaaataaggctagtccgttatcaacttgaaaaagtggcaccgagtcggtgctgaagtgggttactgagaccctaagccgctttttc

SEQ ID NO: 2655 - RNA, 126 nt, synthetic construct
  source 1..126: mol_type = other RNA
gatccccgaaaaagcgggttgttttagagctagaaatagcaagttaaaataaggctagtccgttatcaacttgaaaaagtggcaccgagtcggtgctgtggcaattgtagccacctccgctttttc

SEQ ID NO: 2656 - RNA, 121 nt, synthetic construct
  source 1..121: mol_type = other RNA
gatccccgaaaaagcgggttgttttagagctagaaatagcaagttaaaataaggctagtccgttatcaacttgaaaaagtggcaccgagtcggtgcttggcccaccggcccccgctttttc

SEQ ID NO: 2657 - RNA, 126 nt, synthetic construct
  source 1..126: mol_type = other RNA
gatccccgaaaaagcgggttgttttagagctagaaatagcaagttaaaataaggctagtccgttatcaacttgaaaaagtggcaccgagtcggtgcttgtcgtagtgcacaccaacccgctttttc

SEQ ID NO: 2658 - RNA, 118 nt, synthetic construct
  source 1..118: mol_type = other RNA
gatccccgaaaaagcgggttgttttagagctagaaatagcaagttaaaataaggctagtccgttatcaacttgaaaaagtggcaccgagtcggtgcaagactgagtgcccgctttttc

SEQ ID NO: 2659 - RNA, 120 nt, synthetic construct
  source 1..120: mol_type = other RNA
gatccccgaaaaagcgggttgttttagagctagaaatagcaagttaaaataaggctagtccgttatcaacttgaaaaagtggcaccgagtcggtgcggaagactgagtgcccgctttttc

SEQ ID NO: 2660 - RNA, 122 nt, synthetic construct
  source 1..122: mol_type = other RNA
gatccccgaaaaagcgggttgttttagagctagaaatagcaagttaaaataaggctagtccgttatcaacttgaaaaagtggcaccgagtcggtgcttggaagactgagtgcccgctttttc

SEQ ID NO: 2661 - RNA, 124 nt, synthetic construct
  source 1..124: mol_type = other RNA
gatccccgaaaaagcgggttgttttagagctagaaatagcaagttaaaataaggctagtccgttatcaacttgaaaaagtggcaccgagtcggtgccgttggaagactgagtgcccgctttttc

SEQ ID NO: 2662 - RNA, 126 nt, synthetic construct
  source 1..126: mol_type = other RNA
gatccccgaaaaagcgggttgttttagagctagaaatagcaagttaaaataaggctagtccgttatcaacttgaaaaagtggcaccgagtcggtgccccgttggaagactgagtgcccgctttttc

SEQ ID NO: 2663 - RNA, 118 nt, synthetic construct
  source 1..118: mol_type = other RNA
gatccccgaaaaagcgggttgttttagagctagaaatagcaagttaaaataaggctagtccgttatcaacttgaaaaagtggcaccgagtcggtgccgcggccggcgaccgctttttc

SEQ ID NO: 2664 - RNA, 120 nt, synthetic construct
  source 1..120: mol_type = other RNA
gatccccgaaaaagcgggttgttttagagctagaaatagcaagttaaaataaggctagtccgttatcaacttgaaaaagtggcaccgagtcggtgctccgcggccggcgaccgctttttc

SEQ ID NO: 2665 - RNA, 122 nt, synthetic construct
  source 1..122: mol_type = other RNA
gatccccgaaaaagcgggttgttttagagctagaaatagcaagttaaaataaggctagtccgttatcaacttgaaaaagtggcaccgagtcggtgcggtccgcggccggcgaccgctttttc

SEQ ID NO: 2666 - RNA, 124 nt, synthetic construct
  source 1..124: mol_type = other RNA
gatccccgaaaaagcgggttgttttagagctagaaatagcaagttaaaataaggctagtccgttatcaacttgaaaaagtggcaccgagtcggtgccgggtccgcggccggcgaccgctttttc

SEQ ID NO: 2667 - RNA, 126 nt, synthetic construct
  source 1..126: mol_type = other RNA
gatccccgaaaaagcgggttgttttagagctagaaatagcaagttaaaataaggctagtccgttatcaacttgaaaaagtggcaccgagtcggtgcgccgggtccgcggccggcgaccgctttttc

SEQ ID NO: 2668 - RNA, 118 nt, synthetic construct
  source 1..118: mol_type = other RNA
gatccccgaaaaagcgggttgttttagagctagaaatagcaagttaaaataaggctagtccgttatcaacttgaaaaagtggcaccgagtcggtgcccagtcctgtgaccgctttttc

SEQ ID NO: 2669 - RNA, 120 nt, synthetic construct
  source 1..120: mol_type = other RNA
gatccccgaaaaagcgggttgttttagagctagaaatagcaagttaaaataaggctagtccgttatcaacttgaaaaagtggcaccgagtcggtgcctccagtcctgtgaccgctttttc

SEQ ID NO: 2670 - RNA, 122 nt, synthetic construct
  source 1..122: mol_type = other RNA
gatccccgaaaaagcgggttgttttagagctagaaatagcaagttaaaataaggctagtccgttatcaacttgaaaaagtggcaccgagtcggtgcagctccagtcctgtgaccgctttttc

SEQ ID NO: 2671 - RNA, 124 nt, synthetic construct
  source 1..124: mol_type = other RNA
gatccccgaaaaagcgggttgttttagagctagaaatagcaagttaaaataaggctagtccgttatcaacttgaaaaagtggcaccgagtcggtgcccagctccagtcctgtgaccgctttttc

SEQ ID NO: 2672 - RNA, 126 nt, synthetic construct
  source 1..126: mol_type = other RNA
gatccccgaaaaagcgggttgttttagagctagaaatagcaagttaaaataaggctagtccgttatcaacttgaaaaagtggcaccgagtcggtgcgcccagctccagtcctgtgaccgctttttc

SEQ ID NO: 2673 - RNA, 20 nt, synthetic construct
  source 1..20: mol_type = other RNA
gaagcgggcggagccggctg

SEQ ID NO: 2674 - RNA, 17 nt, synthetic construct
  source 1..17: mol_type = other RNA
ccggctccgcccgcttc

SEQ ID NO: 2675 - RNA, 16 nt, synthetic construct
  source 1..16: mol_type = other RNA
ccggctccgcccgctt

SEQ ID NO: 2676 - RNA, 15 nt, synthetic construct
  source 1..15: mol_type = other RNA
ccggctccgcccgct

SEQ ID NO: 2677 - RNA, 14 nt, synthetic construct
  source 1..14: mol_type = other RNA
ccggctccgcccgc

SEQ ID NO: 2678 - RNA, 13 nt, synthetic construct
  source 1..13: mol_type = other RNA
ccggctccgcccg

SEQ ID NO: 2679 - RNA, 12 nt, synthetic construct
  source 1..12: mol_type = other RNA
ccggctccgccc

SEQ ID NO: 2680 - RNA, 11 nt, synthetic construct
  source 1..11: mol_type = other RNA
ccggctccgcc

SEQ ID NO: 2681 - RNA, 10 nt, synthetic construct
  source 1..10: mol_type = other RNA
ccggctccgc

SEQ ID NO: 2682-2688 - skipped (7 entries)

SEQ ID NO: 2689 - RNA, 144 nt, synthetic construct
  source 1..144: mol_type = other RNA
gaagcgggcggagccggctggttttagagctagaaatagcaagttaaaataaggctagtccgttatcaacttgaaaaagtggcaccgagtcggtgcatgatcctgacgacggagaccgccgtcgtcgacaagccccggctccgc

SEQ ID NO: 2690 - RNA, 146 nt, synthetic construct
  source 1..146: mol_type = other RNA
gaagcgggcggagccggctggttttagagctagaaatagcaagttaaaataaggctagtccgttatcaacttgaaaaagtggcaccgagtcggtgcatgatcctgacgacggagaccgccgtcgtcgacaagccccggctccgccc

SEQ ID NO: 2691 - RNA, 38 nt, synthetic construct
  source 1..38: mol_type = other RNA
ggcttgtcgacgacggcggtctccgtcgtcaggatcat

SEQ ID NO: 2692 - RNA, 38 nt, synthetic construct
  source 1..38: mol_type = other RNA
tttccaagatttgcaaccggcaactgtatgctattacc

SEQ ID NO: 2693 - RNA, 38 nt, synthetic construct
  source 1..38: mol_type = other RNA
tattgttccggtttatcacgaagcgtactcggattaca

SEQ ID NO: 2694 - RNA, 38 nt, synthetic construct
  source 1..38: mol_type = other RNA
tatcgcaccaccctatgcgttccatatcaatacttatc

SEQ ID NO: 2695 - RNA, 38 nt, synthetic construct
  source 1..38: mol_type = other RNA
ttcgtctacagtatccttctttcaacctattcaccgca

SEQ ID NO: 2696 - RNA, 38 nt, synthetic construct
  source 1..38: mol_type = other RNA
tgttatggtgtgaatacttcatggcggatgatttccac

SEQ ID NO: 2697 - RNA, 38 nt, synthetic construct
  source 1..38: mol_type = other RNA
tatgtatacgaagcccatgcaaacatattgccgatcca

SEQ ID NO: 2698 - RNA, 38 nt, synthetic construct
  source 1..38: mol_type = other RNA
ttaccgtgtctacatggtatttggcatttgcgattacc

SEQ ID NO: 2699 - RNA, 38 nt, synthetic construct
  source 1..38: mol_type = other RNA
tatacaaggtacatataccaacgggcactccaacagaa

SEQ ID NO: 2700 - RNA, 38 nt, synthetic construct
  source 1..38: mol_type = other RNA
ttactgcgtatacttggaaatttacacgtccagaggga

SEQ ID NO: 2701 - RNA, 38 nt, synthetic construct
  source 1..38: mol_type = other RNA
tgtatgtacagggtatacggtcaggatatggcaccgcc

SEQ ID NO: 2702 - RNA, 38 nt, synthetic construct
  source 1..38: mol_type = other RNA
tcaccctcgacaagtacaggtactcgaatgcacggaca

SEQ ID NO: 2703 - RNA, 38 nt, synthetic construct
  source 1..38: mol_type = other RNA
ttccgaaagctttcgctctctcaggcgtattctggagc

SEQ ID NO: 2704 - RNA, 38 nt, synthetic construct
  source 1..38: mol_type = other RNA
tggcggagaaatcaattgctctcaacccgtgttgctcc

SEQ ID NO: 2705 - RNA, 38 nt, synthetic construct
  source 1..38: mol_type = other RNA
tcacgttcctcatcttgttaccacgtgcaggcccatac

SEQ ID NO: 2706 - RNA, 38 nt, synthetic construct
  source 1..38: mol_type = other RNA
tctcgtcaagggaaccaaacacgagtatgtgtgggctc

SEQ ID NO: 2707 - RNA, 38 nt, synthetic construct
  source 1..38: mol_type = other RNA
tatactgtgcgccgacatacgagggtttcctgtcactc

SEQ ID NO: 2708 - RNA, 38 nt, synthetic construct
  source 1..38: mol_type = other RNA
tctctggaatctttcgtttctcacgggtgtggtgtggc

SEQ ID NO: 2709 - RNA, 38 nt, synthetic construct
  source 1..38: mol_type = other RNA
tacctatgtacaccagaaccagtcctcgtgtgctccac

SEQ ID NO: 2710 - RNA, 38 nt, synthetic construct
  source 1..38: mol_type = other RNA
taccggagggcgacactcgaggttgtgacctcccacac

SEQ ID NO: 2711 - RNA, 38 nt, synthetic construct
  source 1..38: mol_type = other RNA
tcgtccctgtccgcggccgagagtattgtacgcccaca

SEQ ID NO: 2712 - RNA, 38 nt, synthetic construct
  source 1..38: mol_type = other RNA
tcacgatcgatcgcgcggaactgggtatgctccaccgc

SEQ ID NO: 2713 - RNA, 38 nt, synthetic construct
  source 1..38: mol_type = other RNA
ttctcggaggcatgcgggcatttgcatggctccgtccc

SEQ ID NO: 2714 - RNA, 38 nt, synthetic construct
  source 1..38: mol_type = other RNA
tctctgccgctatgcgttcacgccatggcaaaggcgcc

SEQ ID NO: 2715 - RNA, 38 nt, synthetic construct
  source 1..38: mol_type = other RNA
tgcatgatggtccgatgctgcctgcctcggcctcatcc

SEQ ID NO: 2716 - RNA, 38 nt, synthetic construct
  source 1..38: mol_type = other RNA
tgcgtcgacgcttgcgcatacatgcagaacgggcggtc

SEQ ID NO: 2717 - RNA, 38 nt, synthetic construct
  source 1..38: mol_type = other RNA
tcagctctgtcgaggcccaagccgtggtccttggtgac

SEQ ID NO: 2718 - RNA, 38 nt, synthetic construct
  source 1..38: mol_type = other RNA
tcttccggtacgcgtctcctgggtttcgcccgaaccga

SEQ ID NO: 2719 - RNA, 38 nt, synthetic construct
  source 1..38: mol_type = other RNA
tggcgcaccgcggcggtatctcgggccgagctctgtac

SEQ ID NO: 2720 - RNA, 38 nt, synthetic construct
  source 1..38: mol_type = other RNA
tgccaattgagccgaacagcgcctgcgggcctgccggc

SEQ ID NO: 2721 - RNA, 38 nt, synthetic construct
  source 1..38: mol_type = other RNA
tgtcacacatgctcccggcacctcgcccgacgcacggc

SEQ ID NO: 2722 - RNA, 38 nt, synthetic construct
  source 1..38: mol_type = other RNA
tgcgggcgaacgctgctttcagcggcaccgggcacctc

SEQ ID NO: 2723 - RNA, 38 nt, synthetic construct
  source 1..38: mol_type = other RNA
ttgccgcacgccgagccttctctacgggcccgggcgaa

SEQ ID NO: 2724 - RNA, 38 nt, synthetic construct
  source 1..38: mol_type = other RNA
tgcccgccacgctgcgtccagggacgggaaacgtcacc

SEQ ID NO: 2725 - RNA, 38 nt, synthetic construct
  source 1..38: mol_type = other RNA
tacggcggccggacctctccgcgttacgcctgcatggc

SEQ ID NO: 2726 - RNA, 38 nt, synthetic construct
  source 1..38: mol_type = other RNA
tgctgcgagaaccgcctatcagccgggcgcacgctgcc

SEQ ID NO: 2727 - RNA, 38 nt, synthetic construct
  source 1..38: mol_type = other RNA
tgtgcccaggctttatcggccgcctgccgcgcgttgcc

SEQ ID NO: 2728 - RNA, 38 nt, synthetic construct
  source 1..38: mol_type = other RNA
tgcatcgcggtgcggcccgagccgtcggcgggccttcc

SEQ ID NO: 2729 - RNA, 38 nt, synthetic construct
  source 1..38: mol_type = other RNA
tacgcacacccggcccgggagcgactcggccgcgtggc

SEQ ID NO: 2730 - RNA, 38 nt, synthetic construct
  source 1..38: mol_type = other RNA
tggccgactccggaccgtcacctcgcgcggagcgcggc

SEQ ID NO: 2731 - RNA, 38 nt, synthetic construct
  source 1..38: mol_type = other RNA
tgcgcgccaccacgcgcgcgtggcctccgcacgagacc

SEQ ID NO: 2732 - RNA, 38 nt, synthetic construct
  source 1..38: mol_type = other RNA
tggcggatgagccgcccagaaggcggcgagggccggcc

SEQ ID NO: 2733 - RNA, 38 nt, synthetic construct
  source 1..38: mol_type = other RNA
tgccaggtcgaccgaggccgcgggcccgggaagacggc

SEQ ID NO: 2734 - RNA, 38 nt, synthetic construct
  source 1..38: mol_type = other RNA
tcgcccggcgccgggatgtgcgccgcggagcccggaaa

SEQ ID NO: 2735 - RNA, 38 nt, synthetic construct
  source 1..38: mol_type = other RNA
tcgaagccgcggctggcgcggacgtgcccggcgagcac

SEQ ID NO: 2736 - RNA, 38 nt, synthetic construct
  source 1..38: mol_type = other RNA
tccgtacgggcccagggtacgcccgcgtgccgggcagc

SEQ ID NO: 2737 - RNA, 23 nt, synthetic construct
  source 1..23: mol_type = other RNA
tccgcctcttatctgtgggccgc

SEQ ID NO: 2738 - RNA, 23 nt, synthetic construct
  source 1..23: mol_type = other RNA
tgccaaccgtcgggtccatgcga

SEQ ID NO: 2739 - RNA, 23 nt, synthetic construct
  source 1..23: mol_type = other RNA
ttcgagcgcacccgcaacaagcc

SEQ ID NO: 2740 - RNA, 23 nt, synthetic construct
  source 1..23: mol_type = other RNA
ttcgcgcagcagggttgcgaacc

SEQ ID NO: 2741 - RNA, 23 nt, synthetic construct
  source 1..23: mol_type = other RNA
tttggccggtgcgggacaggtac

SEQ ID NO: 2742 - RNA, 23 nt, synthetic construct
  source 1..23: mol_type = other RNA
tcgtttggcgatggcctcctccc

SEQ ID NO: 2743 - RNA, 23 nt, synthetic construct
  source 1..23: mol_type = other RNA
tctcggcgagccgtctacgtgtc

SEQ ID NO: 2744 - RNA, 23 nt, synthetic construct
  source 1..23: mol_type = other RNA
tcgtggtctcgggcatcagaccc

SEQ ID NO: 2745 - RNA, 23 nt, synthetic construct
  source 1..23: mol_type = other RNA
tgcccagtccgtgtctctgcgca

SEQ ID NO: 2746 - RNA, 53 nt, synthetic construct
  source 1..53: mol_type = other RNA
tgcgtttgtgcaatgggcggcgcagtgggccgcgcatgtatcgccacagatca

SEQ ID NO: 2747 - RNA, 53 nt, synthetic construct
  source 1..53: mol_type = other RNA
tcggaggccacggtcgccacagcaacgtggctgtttcactatggatgtcgggc

SEQ ID NO: 2748 - RNA, 53 nt, synthetic construct
  source 1..53: mol_type = other RNA
tctcggtcacgcacggcgcagctcggacaacccgacacgcattgctactccaa

SEQ ID NO: 2749 - RNA, 53 nt, synthetic construct
  source 1..53: mol_type = other RNA
ttgctccgtggtatcggtcccgagccatatcaggtttgccgccgcgcaaggga

SEQ ID NO: 2750 - RNA, 68 nt, synthetic construct
  source 1..68: mol_type = other RNA
ttgggtgtggcgccaacgggagtgcggcctgggtacctattattgcggccgttgtggtggagaggacc

SEQ ID NO: 2751 - RNA, 68 nt, synthetic construct
  source 1..68: mol_type = other RNA
tcgctggcgtcgtacgcggagtgtgcaagagctgggtggcgaaagtcaagcagaccctggctgcacca

SEQ ID NO: 2752 - RNA, 68 nt, synthetic construct
  source 1..68: mol_type = other RNA
tcggctgtggcaggccgggaagctccatgtacacgctgcaaggcgaagctacccagccgtcaggaaca

SEQ ID NO: 2753 - RNA, 68 nt, synthetic construct
  source 1..68: mol_type = other RNA
ttaccgggcagtgtcctttctgcgcagcagggtcgtaccggactacgcaggaggaaggcttccgcgtc

SEQ ID NO: 2754 - RNA, 68 nt, synthetic construct
  source 1..68: mol_type = other RNA
tacaacgcggatcagggcatccatccacagcgtgcgcgaacggcggtgtcccgagatgggtggtatgc

SEQ ID NO: 2755 - RNA, 68 nt, synthetic construct
  source 1..68: mol_type = other RNA
tcctctcgcctgaatcggactggacagcttcgtgggatggctcgaagagcctccggaggcggtctacc

SEQ ID NO: 2756 - RNA, 68 nt, synthetic construct
  source 1..68: mol_type = other RNA
ttgccgactgatactgcgtccttacgcccgattgcgttacaagggtgcaagcggacgcccgcgcagcc

SEQ ID NO: 2757 - RNA, 68 nt, synthetic construct
  source 1..68: mol_type = other RNA
tcccggagcgaaaccggccaacgaagcgaaagggtggccctgcagtggatatgtggcggctgtcttcc

SEQ ID NO: 2758 - RNA, 68 nt, synthetic construct
  source 1..68: mol_type = other RNA
tccagcaagaggcaacccacccacgcgaagccaccacttgcgccgacgacggaacctcgctcgatttc

SEQ ID NO: 2759 - RNA, 83 nt, synthetic construct
  source 1..83: mol_type = other RNA
tccgaggaggacagagccaaggacagcccttcctcaatctactcacgatcgacgtgcgcggccttgaagcggcgaggtcacgc

SEQ ID NO: 2760 - RNA, 83 nt, synthetic construct
  source 1..83: mol_type = other RNA
tcccgccttcacaccctcgagatactgcgcgctcagccttcacacctatcgcgcacagtcggaccgggctgtactggatggga

SEQ ID NO: 2761 - RNA, 83 nt, synthetic construct
  source 1..83: mol_type = other RNA
ttgcagccaattgtggcaacaccggaagccaaggcacaggatgccgatcgccggtgggcgcgccacttgctggccaagctatc

SEQ ID NO: 2762 - RNA, 83 nt, synthetic construct
  source 1..83: mol_type = other RNA
ttggccaaagacaccacgagaaatgcccaatcagggtggcagggactgccacgaagcggactgcgacgaaggcgcgcacagcc

SEQ ID NO: 2763 - RNA, 83 nt, synthetic construct
  source 1..83: mol_type = other RNA
ttactgagtggcccgtacgcgcagggccgtcggcagaactcagtgtcgaccgacggcagatggtccgtcttctggtcatccca

SEQ ID NO: 2764 - RNA, 83 nt, synthetic construct
  source 1..83: mol_type = other RNA
tcgcggcctgcggttcggtacgttgcgtttcaaaccggtcttcctgcacgtctgcttgcggagcttcgaaagtcgccggagcc

SEQ ID NO: 2765 - RNA, 83 nt, synthetic construct
  source 1..83: mol_type = other RNA
tggcgcctgagccgtttgaaagaggcactcgtgccatattgcctcgacgcctctggcaacgccactccggtgtcccgtgtgga

SEQ ID NO: 2766 - RNA, 83 nt, synthetic construct
  source 1..83: mol_type = other RNA
tcatacgcggcaatcgcgtccttctgtacggacccactacggttgccgctatgtcagagacggcggcgttgcacagccgtgcc

SEQ ID NO: 2767 - RNA, 83 nt, synthetic construct
  source 1..83: mol_type = other RNA
tcccactaccgtcagactcgctcagaacagaccagatcacggcggcgggatccgccttgtcaaggagagcggagcgtacaccc

SEQ ID NO: 2768 - RNA, 83 nt, synthetic construct
  source 1..83: mol_type = other RNA
tgggcgacttacgattggagcattctcctcggctttgttggctcagcgcgacccgctgggaggaggaggacacctgggagcga

SEQ ID NO: 2769 - RNA, 24 nt, synthetic construct
  source 1..24: mol_type = other RNA
acgatgatggtgatgatggtgtgc

SEQ ID NO: 2770 - RNA, 18 nt, synthetic construct
  source 1..18: mol_type = other RNA
taagtcaaatgagacttt

SEQ ID NO: 2771 - RNA, 15 nt, synthetic construct
  source 1..15: mol_type = other RNA
ttaagtgagctgctt

SEQ ID NO: 2772 - RNA, 28 nt, synthetic construct
  source 1..28: mol_type = other RNA
cagacggtggcgcactcatgccacgctt

SEQ ID NO: 2773 - RNA, 25 nt, synthetic construct
  source 1..25: mol_type = other RNA
tcttgtgaatggaattgaggagctt

SEQ ID NO: 2774 - RNA, 25 nt, synthetic construct
  source 1..25: mol_type = other RNA
ggagagaggcgggctctctttcctt

SEQ ID NO: 2775 - RNA, 15 nt, synthetic construct
  source 1..15: mol_type = other RNA
cgggccaccgccctt

SEQ ID NO: 2776 - RNA, 25 nt, synthetic construct
  source 1..25: mol_type = other RNA
gcaaggtgtttgtgcaccttacctt

SEQ ID NO: 2777 - RNA, 20 nt, synthetic construct
  source 1..20: mol_type = other RNA
tttacactagatggtgctgt

SEQ ID NO: 2778 - RNA, 30 nt, synthetic construct
  source 1..30: mol_type = other RNA
tctgcacaagagatattctgttctccatgt

SEQ ID NO: 2779 - RNA, 25 nt, synthetic construct
  source 1..25: mol_type = other RNA
taaaggatcacatataggtcgtggt

SEQ ID NO: 2780 - RNA, 20 nt, synthetic construct
  source 1..20: mol_type = other RNA
gccggcggaagccggctggt

SEQ ID NO: 2781 - RNA, 18 nt, synthetic construct
  source 1..18: mol_type = other RNA
tctgccctcctcttgggt

SEQ ID NO: 2782 - RNA, 30 nt, synthetic construct
  source 1..30: mol_type = other RNA
aaagggttgcactttgctgatacgtggggt

SEQ ID NO: 2783 - RNA, 30 nt, synthetic construct
  source 1..30: mol_type = other RNA
gccggggtatgggcacacgccccgcggggt

SEQ ID NO: 2784 - RNA, 30 nt, synthetic construct
  source 1..30: mol_type = other RNA
gtgatccaagtgctcgacactcccacgggt

SEQ ID NO: 2785 - RNA, 25 nt, synthetic construct
  source 1..25: mol_type = other RNA
gggtgcggcgcaagggccgcctcgt

SEQ ID NO: 2786 - RNA, 15 nt, synthetic construct
  source 1..15: mol_type = other RNA
ttgccctatcggcgt

SEQ ID NO: 2787 - RNA, 25 nt, synthetic construct
  source 1..25: mol_type = other RNA
cccctgcgcggaccgcgccttccgt

SEQ ID NO: 2788 - RNA, 22 nt, synthetic construct
  source 1..22: mol_type = other RNA
gcgccgttgcggccgcgcccgt

SEQ ID NO: 2789 - RNA, 35 nt, synthetic construct
  source 1..35: mol_type = other RNA
tgtgggacgttacattgagtattgagcgcgcacgt

SEQ ID NO: 2790 - RNA, 35 nt, synthetic construct
  source 1..35: mol_type = other RNA
atggggccttaacgacccgcgccccgcctctcagt

SEQ ID NO: 2791 - RNA, 25 nt, synthetic construct
  source 1..25: mol_type = other RNA
ggaggggagtacgcagcgccccagt

SEQ ID NO: 2792 - RNA, 15 nt, synthetic construct
  source 1..15: mol_type = other RNA
acctttggccgttct

SEQ ID NO: 2793 - RNA, 10 nt, synthetic construct
  source 1..10: mol_type = other RNA
catagctgct

SEQ ID NO: 2794 - RNA, 30 nt, synthetic construct
  source 1..30: mol_type = other RNA
cactattacaggaaattgagtaactgggct

SEQ ID NO: 2795 - RNA, 15 nt, synthetic construct
  source 1..15: mol_type = other RNA
gccggggcatgggct

SEQ ID NO: 2796 - RNA, 15 nt, synthetic construct
  source 1..15: mol_type = other RNA
tgccgcacggcggct

SEQ ID NO: 2797 - RNA, 15 nt, synthetic construct
  source 1..15: mol_type = other RNA
gttacacaagtagct

SEQ ID NO: 2798 - RNA, 10 nt, synthetic construct
  source 1..10: mol_type = other RNA
gggcctagct

SEQ ID NO: 2799 - RNA, 20 nt, synthetic construct
  source 1..20: mol_type = other RNA
agctcagattatagtgagct

SEQ ID NO: 2800 - RNA, 20 nt, synthetic construct
  source 1..20: mol_type = other RNA
gtcgcgctgttccgcgagct

SEQ ID NO: 2801 - RNA, 35 nt, synthetic construct
  source 1..35: mol_type = other RNA
tagatcaatttccgagatcactgtcatctcaagct

SEQ ID NO: 2802 - RNA, 15 nt, synthetic construct
  source 1..15: mol_type = other RNA
acgaccgagggtcct

SEQ ID NO: 2803 - RNA, 18 nt, synthetic construct
  source 1..18: mol_type = other RNA
aatttcaagatcctgcct

SEQ ID NO: 2804 - RNA, 18 nt, synthetic construct
  source 1..18: mol_type = other RNA
ggcctggacgccaggcct

SEQ ID NO: 2805 - RNA, 15 nt, synthetic construct
  source 1..15: mol_type = other RNA
gtcacctacgcgcct

SEQ ID NO: 2806 - RNA, 18 nt, synthetic construct
  source 1..18: mol_type = other RNA
tcggccggtcttccgcct

SEQ ID NO: 2807 - RNA, 22 nt, synthetic construct
  source 1..22: mol_type = other RNA
ccgccggctcatcgaaccgcct

SEQ ID NO: 2808 - RNA, 35 nt, synthetic construct
  source 1..35: mol_type = other RNA
gcgaaccgacgtcacggctcggggtactgaggact

SEQ ID NO: 2809 - RNA, 30 nt, synthetic construct
  source 1..30: mol_type = other RNA
ggtactacgtaagcagataaggtaaacact

SEQ ID NO: 2810 - RNA, 40 nt, synthetic construct
  source 1..40: mol_type = other RNA
atactgccggccgagagtaaaggacaggtcattagggtat

SEQ ID NO: 2811 - RNA, 20 nt, synthetic construct
  source 1..20: mol_type = other RNA
cttggacggaaatcgcctat

SEQ ID NO: 2812 - RNA, 15 nt, synthetic construct
  source 1..15: mol_type = other RNA
ttgagcgatgcatat

SEQ ID NO: 2813 - RNA, 20 nt, synthetic construct
  source 1..20: mol_type = other RNA
ggtccaggcaagacgctgat

SEQ ID NO: 2814 - RNA, 28 nt, synthetic construct
  source 1..28: mol_type = other RNA
cgagcttacccgtggggaagcaagggat

SEQ ID NO: 2815 - RNA, 22 nt, synthetic construct
  source 1..22: mol_type = other RNA
ggaccagtgtccgtggcgagat

SEQ ID NO: 2816 - RNA, 15 nt, synthetic construct
  source 1..15: mol_type = other RNA
agtaactacgcagat

SEQ ID NO: 2817 - RNA, 22 nt, synthetic construct
  source 1..22: mol_type = other RNA
gtttcacatggcctggactcat

SEQ ID NO: 2818 - RNA, 20 nt, synthetic construct
  source 1..20: mol_type = other RNA
ctagcgtggcaggtctgcat

SEQ ID NO: 2819 - RNA, 15 nt, synthetic construct
  source 1..15: mol_type = other RNA
ttgccccattggcat

SEQ ID NO: 2820 - RNA, 30 nt, synthetic construct
  source 1..30: mol_type = other RNA
tgtgcccgagggagaatcgaacacatgaat

SEQ ID NO: 2821 - RNA, 22 nt, synthetic construct
  source 1..22: mol_type = other RNA
gctacgggttcgcctgagcaat

SEQ ID NO: 2822 - RNA, 15 nt, synthetic construct
  source 1..15: mol_type = other RNA
aggatcatcgatttg

SEQ ID NO: 2823 - RNA, 15 nt, synthetic construct
  source 1..15: mol_type = other RNA
acagctgggcaggtg

SEQ ID NO: 2824 - RNA, 28 nt, synthetic construct
  source 1..28: mol_type = other RNA
catcggtggtcacttggcggagctcgtg

SEQ ID NO: 2825 - RNA, 20 nt, synthetic construct
  source 1..20: mol_type = other RNA
agagcggcggcccggccgtg

SEQ ID NO: 2826 - RNA, 30 nt, synthetic construct
  source 1..30: mol_type = other RNA
aatcggcgaacgaaacccgaagcgcacgtg

SEQ ID NO: 2827 - RNA, 15 nt, synthetic construct
  source 1..15: mol_type = other RNA
gccctgtccgtagtg

SEQ ID NO: 2828 - RNA, 18 nt, synthetic construct
  source 1..18: mol_type = other RNA
cattgcatacctatagtg

SEQ ID NO: 2829 - RNA, 25 nt, synthetic construct
  source 1..25: mol_type = other RNA
ggccgcagaccgaagcggtgcagtg

SEQ ID NO: 2830 - RNA, 18 nt, synthetic construct
  source 1..18: mol_type = other RNA
gcggccgtcccggggctg

SEQ ID NO: 2831 - RNA, 10 nt, synthetic construct
  source 1..10: mol_type = other RNA
gcctaggctg

SEQ ID NO: 2832 - RNA, 22 nt, synthetic construct
  source 1..22: mol_type = other RNA
ccccaaccgccggcggccgatg

SEQ ID NO: 2833 - RNA, 22 nt, synthetic construct
  source 1..22: mol_type = other RNA
agcctgccccgggccgcggtgg

SEQ ID NO: 2834 - RNA, 30 nt, synthetic construct
  source 1..30: mol_type = other RNA
tgagcaagattctctctaatttcttcctgg

SEQ ID NO: 2835 - RNA, 10 nt, synthetic construct
  source 1..10: mol_type = other RNA
ctgacactgg

SEQ ID NO: 2836 - RNA, 30 nt, synthetic construct
  source 1..30: mol_type = other RNA
aagacaccgcctgggccccgattgatatgg

SEQ ID NO: 2837 - RNA, 20 nt, synthetic construct
  source 1..20: mol_type = other RNA
ggccggacggggcggcgggg

SEQ ID NO: 2838 - RNA, 35 nt, synthetic construct
  source 1..35: mol_type = other RNA
cacccggcccgccgctcccgggcccggggccgggg

SEQ ID NO: 2839 - RNA, 10 nt, synthetic construct
  source 1..10: mol_type = other RNA
caccggcggg

SEQ ID NO: 2840 - RNA, 20 nt, synthetic construct
  source 1..20: mol_type = other RNA
tggtacggccggattccggg

SEQ ID NO: 2841 - RNA, 15 nt, synthetic construct
  source 1..15: mol_type = other RNA
ccgggtggcgccggg

SEQ ID NO: 2842 - RNA, 25 nt, synthetic construct
  source 1..25: mol_type = other RNA
tcggcggccgggctcaggcgccggg

SEQ ID NO: 2843 - RNA, 25 nt, synthetic construct
  source 1..25: mol_type = other RNA
ggcgaggcagccccaaggccccggg

SEQ ID NO: 2844 - RNA, 22 nt, synthetic construct
  source 1..22: mol_type = other RNA
gttcgcgggtgggcgttacggg

SEQ ID NO: 2845 - RNA, 20 nt, synthetic construct
  source 1..20: mol_type = other RNA
ctaccctcctccgcgacggg

SEQ ID NO: 2846 - RNA, 28 nt, synthetic construct
  source 1..28: mol_type = other RNA
gtgaagtcggcgtgaccgagggcacggg

SEQ ID NO: 2847 - RNA, 10 nt, synthetic construct
  source 1..10: mol_type = other RNA
ccggcaaggg

SEQ ID NO: 2848 - RNA, 25 nt, synthetic construct
  source 1..25: mol_type = other RNA
tggtagtttccggtttcggcctcgg

SEQ ID NO: 2849 - RNA, 20 nt, synthetic construct
  source 1..20: mol_type = other RNA
tcggacaccctagacctcgg

SEQ ID NO: 2850 - RNA, 22 nt, synthetic construct
  source 1..22: mol_type = other RNA
ggcgcgggcgggccgggatcgg

SEQ ID NO: 2851 - RNA, 20 nt, synthetic construct
  source 1..20: mol_type = other RNA
gccccacgggccgagtgcgg

SEQ ID NO: 2852 - RNA, 28 nt, synthetic construct
  source 1..28: mol_type = other RNA
agctgcagcccgcctccacgacgggcgg

SEQ ID NO: 2853 - RNA, 35 nt, synthetic construct
  source 1..35: mol_type = other RNA
cccgcgccgccagccctagggtggccgctcggcgg

SEQ ID NO: 2854 - RNA, 40 nt, synthetic construct
  source 1..40: mol_type = other RNA
gcggggcccggcgagtttggcagcgcgacgagcctcgcgg

SEQ ID NO: 2855 - RNA, 22 nt, synthetic construct
  source 1..22: mol_type = other RNA
gccgcccgcctccgcggcgcgg

SEQ ID NO: 2856 - RNA, 18 nt, synthetic construct
  source 1..18: mol_type = other RNA
gccgtaacctccgcgcgg

SEQ ID NO: 2857 - RNA, 40 nt, synthetic construct
  source 1..40: mol_type = other RNA
gcgccggcgcgccaggcgcggcccggccgtgcccgcgcgg

SEQ ID NO: 2858 - RNA, 35 nt, synthetic construct
  source 1..35: mol_type = other RNA
cgctggggcctcccgtcggggcctggcacgcgcgg

SEQ ID NO: 2859 - RNA, 10 nt, synthetic construct
  source 1..10: mol_type = other RNA
gccagcgcgg

SEQ ID NO: 2860 - RNA, 15 nt, synthetic construct
  source 1..15: mol_type = other RNA
attgttcgcaagcgg

SEQ ID NO: 2861 - RNA, 22 nt, synthetic construct
  source 1..22: mol_type = other RNA
ggggcccggcctcaggggccgg

SEQ ID NO: 2862 - RNA, 20 nt, synthetic construct
  source 1..20: mol_type = other RNA
cctttagaaggccaggccgg

SEQ ID NO: 2863 - RNA, 30 nt, synthetic construct
  source 1..30: mol_type = other RNA
gccccgcagcggcacggcctgtggcgccgg

SEQ ID NO: 2864 - RNA, 10 nt, synthetic construct
  source 1..10: mol_type = other RNA
tgtccgccgg

SEQ ID NO: 2865 - RNA, 25 nt, synthetic construct
  source 1..25: mol_type = other RNA
ctagcttcgatcgctacggagccgg

SEQ ID NO: 2866 - RNA, 30 nt, synthetic construct
  source 1..30: mol_type = other RNA
tcgacggtatcggcccagcctgcgagccgg

SEQ ID NO: 2867 - RNA, 28 nt, synthetic construct
  source 1..28: mol_type = other RNA
acggcgcgcaacaacggccacctcccgg

SEQ ID NO: 2868 - RNA, 35 nt, synthetic construct
  source 1..35: mol_type = other RNA
gtacgagccgggccgccggggaagccgttccccgg

SEQ ID NO: 2869 - RNA, 15 nt, synthetic construct
  source 1..15: mol_type = other RNA
cggacgtgctaccgg

SEQ ID NO: 2870 - RNA, 25 nt, synthetic construct
  source 1..25: mol_type = other RNA
atggcagtaggtgtcaatactacgg

SEQ ID NO: 2871 - RNA, 10 nt, synthetic construct
  source 1..10: mol_type = other RNA
cggaggacgg

SEQ ID NO: 2872 - RNA, 20 nt, synthetic construct
  source 1..20: mol_type = other RNA
tgcgggcggccgtgtatagg

SEQ ID NO: 2873 - RNA, 15 nt, synthetic construct
  source 1..15: mol_type = other RNA
tgcgggtcaccgagg

SEQ ID NO: 2874 - RNA, 15 nt, synthetic construct
  source 1..15: mol_type = other RNA
gccacgaggctcagg

SEQ ID NO: 2875 - RNA, 25 nt, synthetic construct
  source 1..25: mol_type = other RNA
ttaaaggggacaataacgcttaagg

SEQ ID NO: 2876 - RNA, 20 nt, synthetic construct
  source 1..20: mol_type = other RNA
gaaacttaaagatgataagg

SEQ ID NO: 2877 - RNA, 30 nt, synthetic construct
  source 1..30: mol_type = other RNA
ggagaccgagcgtgtgcgacgctcctgtcg

SEQ ID NO: 2878 - RNA, 22 nt, synthetic construct
  source 1..22: mol_type = other RNA
cgctccgcgtcccaataggtcg

SEQ ID NO: 2879 - RNA, 25 nt, synthetic construct
  source 1..25: mol_type = other RNA
ccttgtgggctgcgccgagcagtcg

SEQ ID NO: 2880 - RNA, 15 nt, synthetic construct
  source 1..15: mol_type = other RNA
gccgccctggcctcg

SEQ ID NO: 2881 - RNA, 35 nt, synthetic construct
  source 1..35: mol_type = other RNA
gggccaagccgcaggtaccggagaacccggtggcg

SEQ ID NO: 2882 - RNA, 28 nt, synthetic construct
  source 1..28: mol_type = other RNA
agcatatttcacctattggacctgggcg

SEQ ID NO: 2883 - RNA, 40 nt, synthetic construct
  source 1..40: mol_type = other RNA
gcgcgcgggcattgggcgcgggccggcgcgggctggggcg

SEQ ID NO: 2884 - RNA, 25 nt, synthetic construct
  source 1..25: mol_type = other RNA
ccgagcggccacgaggatcggggcg

SEQ ID NO: 2885 - RNA, 28 nt, synthetic construct
  source 1..28: mol_type = other RNA
gcccgctcagcctccccggcccggggcg

SEQ ID NO: 2886 - RNA, 28 nt, synthetic construct
  source 1..28: mol_type = other RNA
ccggggacgccacgcgcggtgcgcggcg

SEQ ID NO: 2887 - RNA, 18 nt, synthetic construct
  source 1..18: mol_type = other RNA
tacccggccgctccggcg

SEQ ID NO: 2888 - RNA, 20 nt, synthetic construct
  source 1..20: mol_type = other RNA
gctgggcgacggccggcgcg

SEQ ID NO: 2889 - RNA, 25 nt, synthetic construct
  source 1..25: mol_type = other RNA
cctaccaccctccgcagcgcgcgcg

SEQ ID NO: 2890 - RNA, 35 nt, synthetic construct
  source 1..35: mol_type = other RNA
aagtagggcaggggacatccggtcccgctagcgcg

SEQ ID NO: 2891 - RNA, 35 nt, synthetic construct
  source 1..35: mol_type = other RNA
cgccgccagcgcgcgacgcggtgccggccgccgcg

SEQ ID NO: 2892 - RNA, 28 nt, synthetic construct
  source 1..28: mol_type = other RNA
ggggcggcgccggcggccggctcccgcg

SEQ ID NO: 2893 - RNA, 25 nt, synthetic construct
  source 1..25: mol_type = other RNA
gcgtcgcccgccggcagcggacgcg

SEQ ID NO: 2894 - RNA, 25 nt, synthetic construct
  source 1..25: mol_type = other RNA
cgaaggaggggttcctcgcggagcg

SEQ ID NO: 2895 - RNA, 10 nt, synthetic construct
  source 1..10: mol_type = other RNA
cgagcgagcg

SEQ ID NO: 2896 - RNA, 30 nt, synthetic construct
  source 1..30: mol_type = other RNA
aatcttgcatttgtcttagcaagatctccg

SEQ ID NO: 2897 - RNA, 40 nt, synthetic construct
  source 1..40: mol_type = other RNA
cgtcgcccggacggggcccggcccacgcgcgagtctgccg

SEQ ID NO: 2898 - RNA, 18 nt, synthetic construct
  source 1..18: mol_type = other RNA
atcgcgcgctggtggccg

SEQ ID NO: 2899 - RNA, 18 nt, synthetic construct
  source 1..18: mol_type = other RNA
ccctcgtacagcgcgccg

SEQ ID NO: 2900 - RNA, 28 nt, synthetic construct
  source 1..28: mol_type = other RNA
gcacggggcacgtcccgggacgtagccg

SEQ ID NO: 2901 - RNA, 15 nt, synthetic construct
  source 1..15: mol_type = other RNA
cccggcgaccagccg

SEQ ID NO: 2902 - RNA, 30 nt, synthetic construct
  source 1..30: mol_type = other RNA
gtgcgccgggccccgcgccccagcctcccg

SEQ ID NO: 2903 - RNA, 15 nt, synthetic construct
  source 1..15: mol_type = other RNA
cgcacgcggggcccg

SEQ ID NO: 2904 - RNA, 25 nt, synthetic construct
  source 1..25: mol_type = other RNA
ttgcggtggtgtcgggtgcggcccg

SEQ ID NO: 2905 - RNA, 18 nt, synthetic construct
  source 1..18: mol_type = other RNA
catcagcggagctccccg

SEQ ID NO: 2906 - RNA, 25 nt, synthetic construct
  source 1..25: mol_type = other RNA
gagggcggttagagtgccattaccg

SEQ ID NO: 2907 - RNA, 22 nt, synthetic construct
  source 1..22: mol_type = other RNA
gaaagtcgctgcgcgcggaccg

SEQ ID NO: 2908 - RNA, 15 nt, synthetic construct
  source 1..15: mol_type = other RNA
ccccgggccggaccg

SEQ ID NO: 2909 - RNA, 18 nt, synthetic construct
  source 1..18: mol_type = other RNA
cgatcttcccgaacaccg

SEQ ID NO: 2910 - RNA, 25 nt, synthetic construct
  source 1..25: mol_type = other RNA
tgcacgggtacactgaagccctacg

SEQ ID NO: 2911 - RNA, 28 nt, synthetic construct
  source 1..28: mol_type = other RNA
atatctcgttggtatttaatatgatacg

SEQ ID NO: 2912 - RNA, 20 nt, synthetic construct
  source 1..20: mol_type = other RNA
gggcgtcggacccatcgacg

SEQ ID NO: 2913 - RNA, 15 nt, synthetic construct
  source 1..15: mol_type = other RNA
gacacgcgcggcacg

SEQ ID NO: 2914 - RNA, 25 nt, synthetic construct
  source 1..25: mol_type = other RNA
ctgaggggccgtgttgcgacccacg

SEQ ID NO: 2915 - RNA, 22 nt, synthetic construct
  source 1..22: mol_type = other RNA
tcctaacagcggacgacccacg

SEQ ID NO: 2916 - RNA, 35 nt, synthetic construct
  source 1..35: mol_type = other RNA
tcccctcccggcacgccgcgcggctcgccagaacg

SEQ ID NO: 2917 - RNA, 28 nt, synthetic construct
  source 1..28: mol_type = other RNA
ttacctattaccaagggctacatcttag

SEQ ID NO: 2918 - RNA, 28 nt, synthetic construct
  source 1..28: mol_type = other RNA
tagcactctatcgcataagtcattctag

SEQ ID NO: 2919 - RNA, 10 nt, synthetic construct
  source 1..10: mol_type = other RNA
gcagtgctag

SEQ ID NO: 2920 - RNA, 30 nt, synthetic construct
  source 1..30: mol_type = other RNA
gcgcgaacctgggatcgccatgcatgatag

SEQ ID NO: 2921 - RNA, 22 nt, synthetic construct
  source 1..22: mol_type = other RNA
gccgactcagtgctgctctgag

SEQ ID NO: 2922 - RNA, 28 nt, synthetic construct
  source 1..28: mol_type = other RNA
ggagagatcacgctcgatacgaggggag

SEQ ID NO: 2923 - RNA, 30 nt, synthetic construct
  source 1..30: mol_type = other RNA
atggcggactcagcgcgccgaagaacggag

SEQ ID NO: 2924 - RNA, 20 nt, synthetic construct
  source 1..20: mol_type = other RNA
acttcacatccagtgacgag

SEQ ID NO: 2925 - RNA, 20 nt, synthetic construct
  source 1..20: mol_type = other RNA
aagcgagtcagaagagagag

SEQ ID NO: 2926 - RNA, 30 nt, synthetic construct
  source 1..30: mol_type = other RNA
cagcgccccgccggcgtaccgccctagcag

SEQ ID NO: 2927 - RNA, 30 nt, synthetic construct
  source 1..30: mol_type = other RNA
gccttactcgaccgccacgacctcgtccag

SEQ ID NO: 2928 - RNA, 30 nt, synthetic construct
  source 1..30: mol_type = other RNA
cctcggatggggccgcggctacgggtacag

SEQ ID NO: 2929 - RNA, 15 nt, synthetic construct
  source 1..15: mol_type = other RNA
aattctgatgtaaag

SEQ ID NO: 2930 - RNA, 25 nt, synthetic construct
  source 1..25: mol_type = other RNA
tgataggtaaggtgtaattactttc

SEQ ID NO: 2931 - RNA, 10 nt, synthetic construct
  source 1..10: mol_type = other RNA
gtacggcttc

SEQ ID NO: 2932 - RNA, 18 nt, synthetic construct
  source 1..18: mol_type = other RNA
tggggtacttatgtcgtc

SEQ ID NO: 2933 - RNA, 18 nt, synthetic construct
  source 1..18: mol_type = other RNA
ctatccggtccgagcgtc

SEQ ID NO: 2934 - RNA, 30 nt, synthetic construct
  source 1..30: mol_type = other RNA
ctgagcggcgaaggcatcccggcctccgtc

SEQ ID NO: 2935 - RNA, 28 nt, synthetic construct
  source 1..28: mol_type = other RNA
gctgtgggtcgcagtcacgcgggccgtc

SEQ ID NO: 2936 - RNA, 15 nt, synthetic construct
  source 1..15: mol_type = other RNA
gcacacaacgacgtc

SEQ ID NO: 2937 - RNA, 25 nt, synthetic construct
  source 1..25: mol_type = other RNA
tagggaagagtcgaatatatctctc

SEQ ID NO: 2938 - RNA, 30 nt, synthetic construct
  source 1..30: mol_type = other RNA
aacccgcagagggacgggtcgttcgccctc

SEQ ID NO: 2939 - RNA, 18 nt, synthetic construct
  source 1..18: mol_type = other RNA
actacgggtgggaacctc

SEQ ID NO: 2940 - RNA, 15 nt, synthetic construct
  source 1..15: mol_type = other RNA
ctgtgcatcgcactc

SEQ ID NO: 2941 - RNA, 35 nt, synthetic construct
  source 1..35: mol_type = other RNA
tcaaacatgaattcttcacgttgttaaagattatc

SEQ ID NO: 2942 - RNA, 35 nt, synthetic construct
  source 1..35: mol_type = other RNA
ggtccattggcactaggggcgttcagtatcatatc

SEQ ID NO: 2943 - RNA, 30 nt, synthetic construct
  source 1..30: mol_type = other RNA
taactgctctatatacgagattatcaaatc

SEQ ID NO: 2944 - RNA, 28 nt, synthetic construct
  source 1..28: mol_type = other RNA
cgatacggcgcccacggcggtgcattgc

SEQ ID NO: 2945 - RNA, 40 nt, synthetic construct
  source 1..40: mol_type = other RNA
tccctgtccgccacctggcgctgctggcgtggacatgtgc

SEQ ID NO: 2946 - RNA, 30 nt, synthetic construct
  source 1..30: mol_type = other RNA
ccggcgcagggcggaccgacgagagcgtgc

SEQ ID NO: 2947 - RNA, 18 nt, synthetic construct
  source 1..18: mol_type = other RNA
actctatcgattatctgc

SEQ ID NO: 2948 - RNA, 35 nt, synthetic construct
  source 1..35: mol_type = other RNA
actgccggggccggcgccgtcgcagcgtccgatgc

SEQ ID NO: 2949 - RNA, 30 nt, synthetic construct
  source 1..30: mol_type = other RNA
gaagaataaacgttggatctcacatcatgc

SEQ ID NO: 2950 - RNA, 25 nt, synthetic construct
  source 1..25: mol_type = other RNA
aaacagacattgtgcctgtgcatgc

SEQ ID NO: 2951 - RNA, 25 nt, synthetic construct
  source 1..25: mol_type = other RNA
cgcgctccagcggtcggggcctggc

SEQ ID NO: 2952 - RNA, 22 nt, synthetic construct
  source 1..22: mol_type = other RNA
tggaaatgccgtggcgtggggc

SEQ ID NO: 2953 - RNA, 18 nt, synthetic construct
  source 1..18: mol_type = other RNA
atgcgcgcgctgtcgggc

SEQ ID NO: 2954 - RNA, 18 nt, synthetic construct
  source 1..18: mol_type = other RNA
cgggcggcgggagcgggc

SEQ ID NO: 2955 - RNA, 25 nt, synthetic construct
  source 1..25: mol_type = other RNA
ggcaacgggacgtccccggggcggc

SEQ ID NO: 2956 - RNA, 20 nt, synthetic construct
  source 1..20: mol_type = other RNA
ccagtcggccctgctccggc

SEQ ID NO: 2957 - RNA, 25 nt, synthetic construct
  source 1..25: mol_type = other RNA
acgcaggccttgcctccacgacggc

SEQ ID NO: 2958 - RNA, 35 nt, synthetic construct
  source 1..35: mol_type = other RNA
cgtgcccgcagccggttggagtgtgagcgggaggc

SEQ ID NO: 2959 - RNA, 15 nt, synthetic construct
  source 1..15: mol_type = other RNA
gcggtgggcggaggc

SEQ ID NO: 2960 - RNA, 20 nt, synthetic construct
  source 1..20: mol_type = other RNA
agcggcttcgaatctcaggc

SEQ ID NO: 2961 - RNA, 40 nt, synthetic construct
  source 1..40: mol_type = other RNA
cgaccggtgcgggccctcgtcgaggagcaagggtgcaggc

SEQ ID NO: 2962 - RNA, 25 nt, synthetic construct
  source 1..25: mol_type = other RNA
aggaaacggcgacctgaggtttcgc

SEQ ID NO: 2963 - RNA, 30 nt, synthetic construct
  source 1..30: mol_type = other RNA
tggaccgccacaggcttggccctagctcgc

SEQ ID NO: 2964 - RNA, 22 nt, synthetic construct
  source 1..22: mol_type = other RNA
gccccgggcgactggcactcgc

SEQ ID NO: 2965 - RNA, 25 nt, synthetic construct
  source 1..25: mol_type = other RNA
cgaagtggtgtagctgacatcgcgc

SEQ ID NO: 2966 - RNA, 30 nt, synthetic construct
  source 1..30: mol_type = other RNA
cccgggtggtggccgcgccggtcagcgcgc

SEQ ID NO: 2967 - RNA, 30 nt, synthetic construct
  source 1..30: mol_type = other RNA
cgaggtagaggcgaggagtagacgccgcgc

SEQ ID NO: 2968 - RNA, 20 nt, synthetic construct
  source 1..20: mol_type = other RNA
gatctaagaactgtctccgc

SEQ ID NO: 2969 - RNA, 15 nt, synthetic construct
  source 1..15: mol_type = other RNA
tcgtgttcaatccgc

SEQ ID NO: 2970 - RNA, 15 nt, synthetic construct
  source 1..15: mol_type = other RNA
ggacattcttgccgc

SEQ ID NO: 2971 - RNA, 40 nt, synthetic construct
  source 1..40: mol_type = other RNA
ggtcctggtgacgacggggtgagagcgaacttaaggccgc

SEQ ID NO: 2972 - RNA, 18 nt, synthetic construct
  source 1..18: mol_type = other RNA
agcccgcgcgttacacgc

SEQ ID NO: 2973 - RNA, 18 nt, synthetic construct
  source 1..18: mol_type = other RNA
gaacactccggccgtagc

SEQ ID NO: 2974 - RNA, 30 nt, synthetic construct
  source 1..30: mol_type = other RNA
ccggtcgtccgttcagagaccatgcggagc

SEQ ID NO: 2975 - RNA, 35 nt, synthetic construct
  source 1..35: mol_type = other RNA
gcgcccagaagtggggaagccgctgccaagagagc

SEQ ID NO: 2976 - RNA, 30 nt, synthetic construct
  source 1..30: mol_type = other RNA
ctcgctctaagatttagccgctgaaagagc

SEQ ID NO: 2977 - RNA, 15 nt, synthetic construct
  source 1..15: mol_type = other RNA
atgtacgggccgtcc

SEQ ID NO: 2978 - RNA, 20 nt, synthetic construct
  source 1..20: mol_type = other RNA
acgccatggagggatagtcc

SEQ ID NO: 2979 - RNA, 25 nt, synthetic construct
  source 1..25: mol_type = other RNA
gtcgctgatttcggtgcgagcctcc

SEQ ID NO: 2980 - RNA, 20 nt, synthetic construct
  source 1..20: mol_type = other RNA
ctgcccctgagggacgatcc

SEQ ID NO: 2981 - RNA, 28 nt, synthetic construct
  source 1..28: mol_type = other RNA
gcaccgaagcgcggtccaatggacatcc

SEQ ID NO: 2982 - RNA, 30 nt, synthetic construct
  source 1..30: mol_type = other RNA
tccaaggccaccccgcgggtaccggaatcc

SEQ ID NO: 2983 - RNA, 18 nt, synthetic construct
  source 1..18: mol_type = other RNA
cgcgcacgccggggtgcc

SEQ ID NO: 2984 - RNA, 28 nt, synthetic construct
  source 1..28: mol_type = other RNA
ccgcgtggggtggcggtgccccggtgcc

SEQ ID NO: 2985 - RNA, 25 nt, synthetic construct
  source 1..25: mol_type = other RNA
ctcacgggtccccgagcccgctgcc

SEQ ID NO: 2986 - RNA, 35 nt, synthetic construct
  source 1..35: mol_type = other RNA
cgcccggcccgttgaacgggtcactggcatcggcc

SEQ ID NO: 2987 - RNA, 28 nt, synthetic construct
  source 1..28: mol_type = other RNA
gcgcaccggagcggaggcagggccggcc

SEQ ID NO: 2988 - RNA, 25 nt, synthetic construct
  source 1..25: mol_type = other RNA
cccgggcgccccgcgaggcccggcc

SEQ ID NO: 2989 - RNA, 30 nt, synthetic construct
  source 1..30: mol_type = other RNA
gccggccgcaccgggccgcgacgcccggcc

SEQ ID NO: 2990 - RNA, 25 nt, synthetic construct
  source 1..25: mol_type = other RNA
ggaagcggagactctatgcttcgcc

SEQ ID NO: 2991 - RNA, 30 nt, synthetic construct
  source 1..30: mol_type = other RNA
ggcccaggcccgggctcccaggccggcgcc

SEQ ID NO: 2992 - RNA, 28 nt, synthetic construct
  source 1..28: mol_type = other RNA
ccccgtcgtacgggccgctcccgccgcc

SEQ ID NO: 2993 - RNA, 18 nt, synthetic construct
  source 1..18: mol_type = other RNA
cccgcgcgaggaggagcc

SEQ ID NO: 2994 - RNA, 38 nt, synthetic construct
  source 1..38: mol_type = other RNA
atgatcctgacgacggagaccgccgtcgtcgacaagcc

SEQ ID NO: 2995 - RNA, 22 nt, synthetic construct
  source 1..22: mol_type = other RNA
ccaggtggtaccatatggtccc

SEQ ID NO: 2996 - RNA, 20 nt, synthetic construct
  source 1..20: mol_type = other RNA
aaaggggacaccggggtccc

SEQ ID NO: 2997 - RNA, 20 nt, synthetic construct
  source 1..20: mol_type = other RNA
ctccgccctagtgtagtccc

SEQ ID NO: 2998 - RNA, 30 nt, synthetic construct
  source 1..30: mol_type = other RNA
ggcgccgaaggtcccaggtggaccgggccc

SEQ ID NO: 2999 - RNA, 25 nt, synthetic construct
  source 1..25: mol_type = other RNA
cgtggccgtaggtccggttcggccc

SEQ ID NO: 3000 - RNA, 25 nt, synthetic construct
  source 1..25: mol_type = other RNA
gtggtgacggaggctcccacggccc

SEQ ID NO: 3001 - RNA, 20 nt, synthetic construct
  source 1..20: mol_type = other RNA
cgggccgccgatgtgcgccc

SEQ ID NO: 3002 - RNA, 18 nt, synthetic construct
  source 1..18: mol_type = other RNA
gctccccagtggccgccc

SEQ ID NO: 3003 - RNA, 22 nt, synthetic construct
  source 1..22: mol_type = other RNA
cctaggcgggtcggagggcccc

SEQ ID NO: 3004 - RNA, 20 nt, synthetic construct
  source 1..20: mol_type = other RNA
aggtcgcctgtgcgcgcccc

SEQ ID NO: 3005 - RNA, 22 nt, synthetic construct
  source 1..22: mol_type = other RNA
aggatgggtagaataacgaccc

SEQ ID NO: 3006 - RNA, 35 nt, synthetic construct
  source 1..35: mol_type = other RNA
cgcatgtcccgcctctacccaggaagatggcaccc

SEQ ID NO: 3007 - RNA, 30 nt, synthetic construct
  source 1..30: mol_type = other RNA
cgacaacaaagattatgtcacttctctacc

SEQ ID NO: 3008 - RNA, 10 nt, synthetic construct
  source 1..10: mol_type = other RNA
agcggggacc

SEQ ID NO: 3009 - RNA, 20 nt, synthetic construct
  source 1..20: mol_type = other RNA
aggtgcacacagttgcgacc

SEQ ID NO: 3010 - RNA, 15 nt, synthetic construct
  source 1..15: mol_type = other RNA
aggtcactcccgacc

SEQ ID NO: 3011 - RNA, 10 nt, synthetic construct
  source 1..10: mol_type = other RNA
ctgcggcacc

SEQ ID NO: 3012 - RNA, 40 nt, synthetic construct
  source 1..40: mol_type = other RNA
cctcctcacctttgccagagggacttcgcttgggaacacc

SEQ ID NO: 3013 - RNA, 30 nt, synthetic construct
  source 1..30: mol_type = other RNA
caagttgtgcccctagtgagcttggattac

SEQ ID NO: 3014 - RNA, 18 nt, synthetic construct
  source 1..18: mol_type = other RNA
ttgctctctgccatgtac

SEQ ID NO: 3015 - RNA, 15 nt, synthetic construct
  source 1..15: mol_type = other RNA
ggcaattaaccatac

SEQ ID NO: 3016 - RNA, 20 nt, synthetic construct
  source 1..20: mol_type = other RNA
atcccgcgagtgaccgcgac

SEQ ID NO: 3017 - RNA, 20 nt, synthetic construct
  source 1..20: mol_type = other RNA
tgtggcccgcgctccggcac

SEQ ID NO: 3018 - RNA, 15 nt, synthetic construct
  source 1..15: mol_type = other RNA
gcgccacaggcgcac

SEQ ID NO: 3019 - RNA, 15 nt, synthetic construct
  source 1..15: mol_type = other RNA
ctcgagtcggaccac

SEQ ID NO: 3020 - RNA, 30 nt, synthetic construct
  source 1..30: mol_type = other RNA
ggtaacgtaatacaaggaaacatgagacac

SEQ ID NO: 3021 - RNA, 25 nt, synthetic construct
  source 1..25: mol_type = other RNA
tgcgtattcctagatagctccacac

SEQ ID NO: 3022 - RNA, 35 nt, synthetic construct
  source 1..35: mol_type = other RNA
accgttaccgccgaacgacctcgcgggctcaacac

SEQ ID NO: 3023 - RNA, 35 nt, synthetic construct
  source 1..35: mol_type = other RNA
cgcagtcacagggagtcgcgaccgttgctgcatta

SEQ ID NO: 3024 - RNA, 18 nt, synthetic construct
  source 1..18: mol_type = other RNA
ggacgcggacgccgggta

SEQ ID NO: 3025 - RNA, 35 nt, synthetic construct
  source 1..35: mol_type = other RNA
cccctaggtagccagaagggcgaaaccacgtgcta

SEQ ID NO: 3026 - RNA, 28 nt, synthetic construct
  source 1..28: mol_type = other RNA
acgccctcgagcacccaggcgaccccta

SEQ ID NO: 3027 - RNA, 28 nt, synthetic construct
  source 1..28: mol_type = other RNA
tctgcaacgatggaatcaacacactata

SEQ ID NO: 3028 - RNA, 20 nt, synthetic construct
  source 1..20: mol_type = other RNA
gtatcggggtaatgcatata

SEQ ID NO: 3029 - RNA, 35 nt, synthetic construct
  source 1..35: mol_type = other RNA
ttctcaaagagactttgttaagggtaccgctgata

SEQ ID NO: 3030 - RNA, 25 nt, synthetic construct
  source 1..25: mol_type = other RNA
gtcagctctatatttcctgacttga

SEQ ID NO: 3031 - RNA, 18 nt, synthetic construct
  source 1..18: mol_type = other RNA
ttctacgccggtttctga

SEQ ID NO: 3032 - RNA, 22 nt, synthetic construct
  source 1..22: mol_type = other RNA
ttggagtttgctctgtgtatga

SEQ ID NO: 3033 - RNA, 35 nt, synthetic construct
  source 1..35: mol_type = other RNA
gaccgccgtagagtacaatgactcacgcggctcga

SEQ ID NO: 3034 - RNA, 30 nt, synthetic construct
  source 1..30: mol_type = other RNA
cggcggatcgcgcccctggcgcggggccga

SEQ ID NO: 3035 - RNA, 15 nt, synthetic construct
  source 1..15: mol_type = other RNA
tgcacgcggggccga

SEQ ID NO: 3036 - RNA, 35 nt, synthetic construct
  source 1..35: mol_type = other RNA
gtcggcctgcacgccggccacgcccggggcgccga

SEQ ID NO: 3037 - RNA, 28 nt, synthetic construct
  source 1..28: mol_type = other RNA
aagccctgcgcagcggtccgtccgccga

SEQ ID NO: 3038 - RNA, 20 nt, synthetic construct
  source 1..20: mol_type = other RNA
gcctggccgggcctcaccga

SEQ ID NO: 3039 - RNA, 23 nt, synthetic construct
  source 1..23: mol_type = other RNA
gggtctgatgcccgagaccacga

SEQ ID NO: 3040 - RNA, 22 nt, synthetic construct
  source 1..22: mol_type = other RNA
aggaacatcaagtgctagaaga

SEQ ID NO: 3041 - RNA, 25 nt, synthetic construct
  source 1..25: mol_type = other RNA
cttagggtctcagtaacccacttca

SEQ ID NO: 3042 - RNA, 22 nt, synthetic construct
  source 1..22: mol_type = other RNA
gcctcgcgggcggcccgggtca

SEQ ID NO: 3043 - RNA, 20 nt, synthetic construct
  source 1..20: mol_type = other RNA
acgggacatttgttatctca

SEQ ID NO: 3044 - RNA, 15 nt, synthetic construct
  source 1..15: mol_type = other RNA
tgtagctatggatca

SEQ ID NO: 3045 - RNA, 35 nt, synthetic construct
  source 1..35: mol_type = other RNA
ggatggctaattatctgtttacccgtcacaaatca

SEQ ID NO: 3046 - RNA, 28 nt, synthetic construct
  source 1..28: mol_type = other RNA
ccaggacaaggaacgattgaatggtgca

SEQ ID NO: 3047 - RNA, 30 nt, synthetic construct
  source 1..30: mol_type = other RNA
gcccacccgtccggcggacggcctcctgca

SEQ ID NO: 3048 - RNA, 38 nt, synthetic construct
  source 1..38: mol_type = other RNA
ggatgaggccgaggcaggcagcatcggaccatcatgca

SEQ ID NO: 3049 - RNA, 22 nt, synthetic construct
  source 1..22: mol_type = other RNA
tttccggcgcgcagatcgggca

SEQ ID NO: 3050 - RNA, 20 nt, synthetic construct
  source 1..20: mol_type = other RNA
cgccccgcggggcgctcgca

SEQ ID NO: 3051 - RNA, 15 nt, synthetic construct
  source 1..15: mol_type = other RNA
gagcccagcatagca

SEQ ID NO: 3052 - RNA, 28 nt, synthetic construct
  source 1..28: mol_type = other RNA
ggcctgtggctacgggcggcgggcagca

SEQ ID NO: 3053 - RNA, 22 nt, synthetic construct
  source 1..22: mol_type = other RNA
actatacggaccgagtccgcca

SEQ ID NO: 3054 - RNA, 15 nt, synthetic construct
  source 1..15: mol_type = other RNA
acgcgcgttacccca

SEQ ID NO: 3055 - RNA, 35 nt, synthetic construct
  source 1..35: mol_type = other RNA
tgttgacttaacgccatgacctggtgctgtcacca

SEQ ID NO: 3056 - RNA, 25 nt, synthetic construct
  source 1..25: mol_type = other RNA
agttcgcttccatagcatttaacca

SEQ ID NO: 3057 - RNA, 22 nt, synthetic construct
  source 1..22: mol_type = other RNA
tatctaacaatgaagttgcaca

SEQ ID NO: 3058 - RNA, 20 nt, synthetic construct
  source 1..20: mol_type = other RNA
aggtggctacaattgccaca

SEQ ID NO: 3059 - RNA, 25 nt, synthetic construct
  source 1..25: mol_type = other RNA
atgcgtccacgcgcccaggctgtaa

SEQ ID NO: 3060 - RNA, 22 nt, synthetic construct
  source 1..22: mol_type = other RNA
agtcataccacgcacatcataa

SEQ ID NO: 3061 - RNA, 40 nt, synthetic construct
  source 1..40: mol_type = other RNA
tacttcttgaatgtaattaccaaatacgttagctatggaa

SEQ ID NO: 3062 - RNA, 35 nt, synthetic construct
  source 1..35: mol_type = other RNA
cgccgcgggctgggcccgggcgcgggcgggcggaa

SEQ ID NO: 3063 - RNA, 20 nt, synthetic construct
  source 1..20: mol_type = other RNA
ccggagggctccgaccggaa

SEQ ID NO: 3064 - RNA, 28 nt, synthetic construct
  source 1..28: mol_type = other RNA
atcaagcgacgcacgcgtgcctccagaa

SEQ ID NO: 3065 - RNA, 18 nt, synthetic construct
  source 1..18: mol_type = other RNA
cggtccgcaccgcaagaa

SEQ ID NO: 3066 - RNA, 22 nt, synthetic construct
  source 1..22: mol_type = other RNA
gcggtatcacctacgacatcaa

SEQ ID NO: 3067 - RNA, 38 nt, synthetic construct
  source 1..38: mol_type = other RNA
ttcgcccgggcccgtagagaaggctcggcgtgcggcaa

SEQ ID NO: 3068 - RNA, 15 nt, synthetic construct
  source 1..15: mol_type = other RNA
gggccggtgggccaa

SEQ ID NO: 3069 - RNA, 10 nt, synthetic construct
  source 1..10: mol_type = other RNA
gcccctacaa

SEQ ID NO: 3070 - RNA, 20 nt, synthetic construct
  source 1..20: mol_type = other RNA
gttggtgtgcactacgacaa

SEQ ID NO: 3071 - RNA, 40 nt, synthetic construct
  source 1..40: mol_type = other RNA
caatgttcgtataaccgtccctagtgtgtctgttactaaa

SEQ ID NO: 3072 - RNA, 20 nt, synthetic construct
  source 1..20: mol_type = other RNA
agtagctgtacccaactaaa

SEQ ID NO: 3073 - RNA, 28 nt, synthetic construct
  source 1..28: mol_type = other RNA
cgcgaggacaacctttccaattcggaaa

SEQ ID NO: 3074 - RNA, 10 nt, synthetic construct
  source 1..10: mol_type = other RNA
gaagcggaaa

SEQ ID NO: 3075 - RNA, 38 nt, synthetic construct; identical to SEQ ID NO: 2994
  source 1..38: mol_type = other RNA

SEQ ID NO: 3076 - RNA, 38 nt, synthetic construct
  source 1..38: mol_type = other RNA
ggtaatagcatacagttgccggttgcaaatcttggaaa

SEQ ID NO: 3077 - RNA, 38 nt, synthetic construct
  source 1..38: mol_type = other RNA
tgtaatccgagtacgcttcgtgataaaccggaacaata

SEQ ID NO: 3078 - RNA, 38 nt, synthetic construct
  source 1..38: mol_type = other RNA
gataagtattgatatggaacgcatagggtggtgcgata

SEQ ID NO: 3079 - RNA, 38 nt, synthetic construct
  source 1..38: mol_type = other RNA
tgcggtgaataggttgaaagaaggatactgtagacgaa

SEQ ID NO: 3080 - RNA, 38 nt, synthetic construct
  source 1..38: mol_type = other RNA
gtggaaatcatccgccatgaagtattcacaccataaca

SEQ ID NO: 3081 - RNA, 38 nt, synthetic construct
  source 1..38: mol_type = other RNA
tggatcggcaatatgtttgcatgggcttcgtatacata

SEQ ID NO: 3082 - RNA, 38 nt, synthetic construct
  source 1..38: mol_type = other RNA
ggtaatcgcaaatgccaaataccatgtagacacggtaa

SEQ ID NO: 3083 - RNA, 38 nt, synthetic construct
  source 1..38: mol_type = other RNA
ttctgttggagtgcccgttggtatatgtaccttgtata

SEQ ID NO: 3084 - RNA, 38 nt, synthetic construct
  source 1..38: mol_type = other RNA
tccctctggacgtgtaaatttccaagtatacgcagtaa

SEQ ID NO: 3085 - RNA, 38 nt, synthetic construct
  source 1..38: mol_type = other RNA
ggcggtgccatatcctgaccgtataccctgtacataca

SEQ ID NO: 3086 - RNA, 38 nt, synthetic construct
  source 1..38: mol_type = other RNA
tgtccgtgcattcgagtacctgtacttgtcgagggtga

SEQ ID NO: 3087 - RNA, 38 nt, synthetic construct
  source 1..38: mol_type = other RNA
gctccagaatacgcctgagagagcgaaagctttcggaa

SEQ ID NO: 3088 - RNA, 38 nt, synthetic construct
  source 1..38: mol_type = other RNA
ggagcaacacgggttgagagcaattgatttctccgcca

SEQ ID NO: 3089 - RNA, 38 nt, synthetic construct
  source 1..38: mol_type = other RNA
gtatgggcctgcacgtggtaacaagatgaggaacgtga

SEQ ID NO: 3090 - RNA, 38 nt, synthetic construct
  source 1..38: mol_type = other RNA
gagcccacacatactcgtgtttggttcccttgacgaga

SEQ ID NO: 3091 - RNA, 38 nt, synthetic construct
  source 1..38: mol_type = other RNA
gagtgacaggaaaccctcgtatgtcggcgcacagtata

SEQ ID NO: 3092 - RNA, 38 nt, synthetic construct
  source 1..38: mol_type = other RNA
gccacaccacacccgtgagaaacgaaagattccagaga

SEQ ID NO: 3093 - RNA, 38 nt, synthetic construct
  source 1..38: mol_type = other RNA
gtggagcacacgaggactggttctggtgtacataggta

SEQ ID NO: 3094 - RNA, 38 nt, synthetic construct
  source 1..38: mol_type = other RNA
gtgtgggaggtcacaacctcgagtgtcgccctccggta

SEQ ID NO: 3095 - RNA, 38 nt, synthetic construct
  source 1..38: mol_type = other RNA
tgtgggcgtacaatactctcggccgcggacagggacga

SEQ ID NO: 3096 - RNA, 38 nt, synthetic construct
  source 1..38: mol_type = other RNA
gcggtggagcatacccagttccgcgcgatcgatcgtga

SEQ ID NO: 3097 - RNA, 38 nt, synthetic construct
  source 1..38: mol_type = other RNA
gggacggagccatgcaaatgcccgcatgcctccgagaa

SEQ ID NO: 3098 - RNA, 38 nt, synthetic construct
  source 1..38: mol_type = other RNA
ggcgcctttgccatggcgtgaacgcatagcggcagaga

SEQ ID NO: 3099 - RNA, 38 nt, synthetic construct; identical to SEQ ID NO: 3048
  source 1..38: mol_type = other RNA

SEQ ID NO: 3100 - RNA, 38 nt, synthetic construct
  source 1..38: mol_type = other RNA
gaccgcccgttctgcatgtatgcgcaagcgtcgacgca

SEQ ID NO: 3101 - RNA, 38 nt, synthetic construct
  source 1..38: mol_type = other RNA
gtcaccaaggaccacggcttgggcctcgacagagctga

SEQ ID NO: 3102 - RNA, 38 nt, synthetic construct
  source 1..38: mol_type = other RNA
tcggttcgggcgaaacccaggagacgcgtaccggaaga

SEQ ID NO: 3103 - RNA, 38 nt, synthetic construct
  source 1..38: mol_type = other RNA
gtacagagctcggcccgagataccgccgcggtgcgcca

SEQ ID NO: 3104 - RNA, 38 nt, synthetic construct
  source 1..38: mol_type = other RNA
gccggcaggcccgcaggcgctgttcggctcaattggca

SEQ ID NO: 3105 - RNA, 38 nt, synthetic construct
  source 1..38: mol_type = other RNA
gccgtgcgtcgggcgaggtgccgggagcatgtgtgaca

SEQ ID NO: 3106 - RNA, 38 nt, synthetic construct
  source 1..38: mol_type = other RNA
gaggtgcccggtgccgctgaaagcagcgttcgcccgca

SEQ ID NO: 3107 - RNA, 38 nt, synthetic construct; identical to SEQ ID NO: 3067
  source 1..38: mol_type = other RNA

SEQ ID NO: 3108 - RNA, 38 nt, synthetic construct
  source 1..38: mol_type = other RNA
ggtgacgtttcccgtccctggacgcagcgtggcgggca

SEQ ID NO: 3109 - RNA, 38 nt, synthetic construct
  source 1..38: mol_type = other RNA
gccatgcaggcgtaacgcggagaggtccggccgccgta

SEQ ID NO: 3110 - RNA, 38 nt, synthetic construct
  source 1..38: mol_type = other RNA
ggcagcgtgcgcccggctgataggcggttctcgcagca

SEQ ID NO: 3111 - RNA, 38 nt, synthetic construct
  source 1..38: mol_type = other RNA
ggcaacgcgcggcaggcggccgataaagcctgggcaca

SEQ ID NO: 3112 - RNA, 38 nt, synthetic construct
  source 1..38: mol_type = other RNA
ggaaggcccgccgacggctcgggccgcaccgcgatgca

SEQ ID NO: 3113 - RNA, 38 nt, synthetic construct
  source 1..38: mol_type = other RNA
gccacgcggccgagtcgctcccgggccgggtgtgcgta

SEQ ID NO: 3114 - RNA, 38 nt, synthetic construct
  source 1..38: mol_type = other RNA
gccgcgctccgcgcgaggtgacggtccggagtcggcca

SEQ ID NO: 3115 - RNA, 38 nt, synthetic construct
  source 1..38: mol_type = other RNA
ggtctcgtgcggaggccacgcgcgcgtggtggcgcgca

SEQ ID NO: 3116 - RNA, 38 nt, synthetic construct
  source 1..38: mol_type = other RNA
ggccggccctcgccgccttctgggcggctcatccgcca

SEQ ID NO: 3117 - RNA, 38 nt, synthetic construct
  source 1..38: mol_type = other RNA
gccgtcttcccgggcccgcggcctcggtcgacctggca

SEQ ID NO: 3118 - RNA, 38 nt, synthetic construct
  source 1..38: mol_type = other RNA
tttccgggctccgcggcgcacatcccggcgccgggcga

SEQ ID NO: 3119 - RNA, 38 nt, synthetic construct
  source 1..38: mol_type = other RNA
gtgctcgccgggcacgtccgcgccagccgcggcttcga

SEQ ID NO: 3120 - RNA, 38 nt, synthetic construct
  source 1..38: mol_type = other RNA
gctgcccggcacgcgggcgtaccctgggcccgtacgga

SEQ ID NO: 3121 - RNA, 23 nt, synthetic construct
  source 1..23: mol_type = other RNA
gcggcccacagataagaggcgga

SEQ ID NO: 3122 - RNA, 23 nt, synthetic construct
  source 1..23: mol_type = other RNA
tcgcatggacccgacggttggca

SEQ ID NO: 3123 - RNA, 23 nt, synthetic construct
  source 1..23: mol_type = other RNA
ggcttgttgcgggtgcgctcgaa

SEQ ID NO: 3124 - RNA, 23 nt, synthetic construct
  source 1..23: mol_type = other RNA
ggttcgcaaccctgctgcgcgaa

SEQ ID NO: 3125 - RNA, 23 nt, synthetic construct
  source 1..23: mol_type = other RNA
gtacctgtcccgcaccggccaaa

SEQ ID NO: 3126 - RNA, 23 nt, synthetic construct
  source 1..23: mol_type = other RNA
gggaggaggccatcgccaaacga

SEQ ID NO: 3127 - RNA, 23 nt, synthetic construct
  source 1..23: mol_type = other RNA
gacacgtagacggctcgccgaga

SEQ ID NO: 3128 - RNA, 23 nt, synthetic construct
  source 1..23: mol_type = other RNA
gggtctgatgcccgagaccacga

SEQ ID NO: 3129 - RNA, 23 nt, synthetic construct
  source 1..23: mol_type = other RNA
tgcgcagagacacggactgggca

SEQ ID NO: 3130 - RNA, 53 nt, synthetic construct
  source 1..53: mol_type = other RNA
tgatctgtggcgatacatgcgcggcccactgcgccgcccattgcacaaacgca

SEQ ID NO: 3131 - RNA, 53 nt, synthetic construct
  source 1..53: mol_type = other RNA
gcccgacatccatagtgaaacagccacgttgctgtggcgaccgtggcctccga

SEQ ID NO: 3132 - RNA, 53 nt, synthetic construct
  source 1..53: mol_type = other RNA
ttggagtagcaatgcgtgtcgggttgtccgagctgcgccgtgcgtgaccgaga

SEQ ID NO: 3133 - RNA, 53 nt, synthetic construct
  source 1..53: mol_type = other RNA
tcccttgcgcggcggcaaacctgatatggctcgggaccgataccacggagcaa

SEQ ID NO: 3134 - RNA, 68 nt, synthetic construct
  source 1..68: mol_type = other RNA
ggtcctctccaccacaacggccgcaataataggtacccaggccgcactcccgttggcgccacacccaa

SEQ ID NO: 3135 - RNA, 68 nt, synthetic construct
  source 1..68: mol_type = other RNA
tggtgcagccagggtctgcttgactttcgccacccagctcttgcacactccgcgtacgacgccagcga

SEQ ID NO: 3136 - RNA, 68 nt, synthetic construct
  source 1..68: mol_type = other RNA
tgttcctgacggctgggtagcttcgccttgcagcgtgtacatggagcttcccggcctgccacagccga

SEQ ID NO: 3137 - RNA, 68 nt, synthetic construct
  source 1..68: mol_type = other RNA
gacgcggaagccttcctcctgcgtagtccggtacgaccctgctgcgcagaaaggacactgcccggtaa

SEQ ID NO: 3138 - RNA, 68 nt, synthetic construct
  source 1..68: mol_type = other RNA
gcataccacccatctcgggacaccgccgttcgcgcacgctgtggatggatgccctgatccgcgttgta

SEQ ID NO: 3139 - RNA, 68 nt, synthetic construct
  source 1..68: mol_type = other RNA
ggtagaccgcctccggaggctcttcgagccatcccacgaagctgtccagtccgattcaggcgagagga

SEQ ID NO: 3140 - RNA, 68 nt, synthetic construct
  source 1..68: mol_type = other RNA
ggctgcgcgggcgtccgcttgcacccttgtaacgcaatcgggcgtaaggacgcagtatcagtcggcaa

SEQ ID NO: 3141 - RNA, 68 nt, synthetic construct
  source 1..68: mol_type = other RNA
ggaagacagccgccacatatccactgcagggccaccctttcgcttcgttggccggtttcgctccggga

SEQ ID NO: 3142 - RNA, 68 nt, synthetic construct
  source 1..68: mol_type = other RNA
gaaatcgagcgaggttccgtcgtcggcgcaagtggtggcttcgcgtgggtgggttgcctcttgctgga

SEQ ID NO: 3143 - RNA, 83 nt, synthetic construct
  source 1..83: mol_type = other RNA
gcgtgacctcgccgcttcaaggccgcgcacgtcgatcgtgagtagattgaggaagggctgtccttggctctgtcctcctcgga

SEQ ID NO: 3144 - RNA, 83 nt, synthetic construct
  source 1..83: mol_type = other RNA
tcccatccagtacagcccggtccgactgtgcgcgataggtgtgaaggctgagcgcgcagtatctcgagggtgtgaaggcggga

SEQ ID NO: 3145 - RNA, 83 nt, synthetic construct
  source 1..83: mol_type = other RNA
gatagcttggccagcaagtggcgcgcccaccggcgatcggcatcctgtgccttggcttccggtgttgccacaattggctgcaa

SEQ ID NO: 3146 - RNA, 83 nt, synthetic construct
  source 1..83: mol_type = other RNA
ggctgtgcgcgccttcgtcgcagtccgcttcgtggcagtccctgccaccctgattgggcatttctcgtggtgtctttggccaa

SEQ ID NO: 3147 - RNA, 83 nt, synthetic construct
  source 1..83: mol_type = other RNA
tgggatgaccagaagacggaccatctgccgtcggtcgacactgagttctgccgacggccctgcgcgtacgggccactcagtaa

SEQ ID NO: 3148 - RNA, 83 nt, synthetic construct
  source 1..83: mol_type = other RNA
ggctccggcgactttcgaagctccgcaagcagacgtgcaggaagaccggtttgaaacgcaacgtaccgaaccgcaggccgcga

SEQ ID NO: 3149 - RNA, 83 nt, synthetic construct
  source 1..83: mol_type = other RNA
tccacacgggacaccggagtggcgttgccagaggcgtcgaggcaatatggcacgagtgcctctttcaaacggctcaggcgcca

SEQ ID NO: 3150 - RNA, 83 nt, synthetic construct
  source 1..83: mol_type = other RNA
ggcacggctgtgcaacgccgccgtctctgacatagcggcaaccgtagtgggtccgtacagaaggacgcgattgccgcgtatga

SEQ ID NO: 3151 - RNA, 83 nt, synthetic construct
  source 1..83: mol_type = other RNA
gggtgtacgctccgctctccttgacaaggcggatcccgccgccgtgatctggtctgttctgagcgagtctgacggtagtggga

SEQ ID NO: 3152 - RNA, 83 nt, synthetic construct
  source 1..83: mol_type = other RNA
tcgctcccaggtgtcctcctcctcccagcgggtcgcgctgagccaacaaagccgaggagaatgctccaatcgtaagtcgccca

SEQ ID NO: 3153 - RNA, 24 nt, synthetic construct
  source 1..24: mol_type = other RNA
acaccatcatcaccatcatcgtgc

SEQ ID NO: 3154 - RNA, 18 nt, synthetic construct
  source 1..18: mol_type = other RNA
aaagtctcatttgactta

SEQ ID NO: 3155 - RNA, 15 nt, synthetic construct
  source 1..15: mol_type = other RNA
aagcagctcacttaa

SEQ ID NO: 3156 - RNA, 28 nt, synthetic construct
  source 1..28: mol_type = other RNA
aagcgtggcatgagtgcgccaccgtctg

SEQ ID NO: 3157 - RNA, 25 nt, synthetic construct
  source 1..25: mol_type = other RNA
aagctcctcaattccattcacaaga

SEQ ID NO: 3158 - RNA, 25 nt, synthetic construct
  source 1..25: mol_type = other RNA
aaggaaagagagcccgcctctctcc

SEQ ID NO: 3159 - RNA, 15 nt, synthetic construct
  source 1..15: mol_type = other RNA
aagggcggtggcccg

SEQ ID NO: 3160 - RNA, 25 nt, synthetic construct
  source 1..25: mol_type = other RNA
aaggtaaggtgcacaaacaccttgc

SEQ ID NO: 3161 - RNA, 20 nt, synthetic construct
  source 1..20: mol_type = other RNA
acagcaccatctagtgtaaa

SEQ ID NO: 3162 - RNA, 30 nt, synthetic construct
  source 1..30: mol_type = other RNA
acatggagaacagaatatctcttgtgcaga

SEQ ID NO: 3163 - RNA, 25 nt, synthetic construct
  source 1..25: mol_type = other RNA
accacgacctatatgtgatccttta

SEQ ID NO: 3164 - RNA, 20 nt, synthetic construct
  source 1..20: mol_type = other RNA
accagccggcttccgccggc

SEQ ID NO: 3165 - RNA, 18 nt, synthetic construct
  source 1..18: mol_type = other RNA
acccaagaggagggcaga

SEQ ID NO: 3166 - RNA, 30 nt, synthetic construct
  source 1..30: mol_type = other RNA
accccacgtatcagcaaagtgcaacccttt

SEQ ID NO: 3167 - RNA, 30 nt, synthetic construct
  source 1..30: mol_type = other RNA
accccgcggggcgtgtgcccataccccggc

SEQ ID NO: 3168 - RNA, 30 nt, synthetic construct
  source 1..30: mol_type = other RNA
acccgtgggagtgtcgagcacttggatcac

SEQ ID NO: 3169 - RNA, 25 nt, synthetic construct
  source 1..25: mol_type = other RNA
acgaggcggcccttgcgccgcaccc

SEQ ID NO: 3170 - RNA, 15 nt, synthetic construct
  source 1..15: mol_type = other RNA
acgccgatagggcaa

SEQ ID NO: 3171 - RNA, 25 nt, synthetic construct
  source 1..25: mol_type = other RNA
acggaaggcgcggtccgcgcagggg

SEQ ID NO: 3172 - RNA, 22 nt, synthetic construct
  source 1..22: mol_type = other RNA
acgggcgcggccgcaacggcgc

SEQ ID NO: 3173 - RNA, 35 nt, synthetic construct
  source 1..35: mol_type = other RNA
acgtgcgcgctcaatactcaatgtaacgtcccaca

SEQ ID NO: 3174 - RNA, 35 nt, synthetic construct
  source 1..35: mol_type = other RNA
actgagaggcggggcgcgggtcgttaaggccccat

SEQ ID NO: 3175 - RNA, 25 nt, synthetic construct
  source 1..25: mol_type = other RNA
actggggcgctgcgtactcccctcc

SEQ ID NO: 3176 - RNA, 15 nt, synthetic construct
  source 1..15: mol_type = other RNA
agaacggccaaaggt

SEQ ID NO: 3177 - RNA, 10 nt, synthetic construct
  source 1..10: mol_type = other RNA
agcagctatg

SEQ ID NO: 3178 - RNA, 30 nt, synthetic construct
  source 1..30: mol_type = other RNA
agcccagttactcaatttcctgtaatagtg

SEQ ID NO: 3179 - RNA, 15 nt, synthetic construct
  source 1..15: mol_type = other RNA
agcccatgccccggc

SEQ ID NO: 3180 - RNA, 15 nt, synthetic construct
  source 1..15: mol_type = other RNA
agccgccgtgcggca

SEQ ID NO: 3181 - RNA, 15 nt, synthetic construct
  source 1..15: mol_type = other RNA
agctacttgtgtaac

SEQ ID NO: 3182 - RNA, 10 nt, synthetic construct
  source 1..10: mol_type = other RNA
agctaggccc

SEQ ID NO: 3183 - RNA, 20 nt, synthetic construct
  source 1..20: mol_type = other RNA
agctcactataatctgagct

SEQ ID NO: 3184 - RNA, 20 nt, synthetic construct
  source 1..20: mol_type = other RNA
agctcgcggaacagcgcgac

SEQ ID NO: 3185 - RNA, 35 nt, synthetic construct
  source 1..35: mol_type = other RNA
agcttgagatgacagtgatctcggaaattgatcta

SEQ ID NO: 3186 - RNA, 15 nt, synthetic construct
  source 1..15: mol_type = other RNA
aggaccctcggtcgt

SEQ ID NO: 3187 - RNA, 18 nt, synthetic construct
  source 1..18: mol_type = other RNA
aggcaggatcttgaaatt

SEQ ID NO: 3188 - RNA, 18 nt, synthetic construct
  source 1..18: mol_type = other RNA
aggcctggcgtccaggcc

SEQ ID NO: 3189 - RNA, 15 nt, synthetic construct
  source 1..15: mol_type = other RNA
aggcgcgtaggtgac

SEQ ID NO: 3190 - RNA, 18 nt, synthetic construct
  source 1..18: mol_type = other RNA
aggcggaagaccggccga

SEQ ID NO: 3191 - RNA, 22 nt, synthetic construct
  source 1..22: mol_type = other RNA
aggcggttcgatgagccggcgg

SEQ ID NO: 3192 - RNA, 35 nt, synthetic construct
  source 1..35: mol_type = other RNA
agtcctcagtaccccgagccgtgacgtcggttcgc

SEQ ID NO: 3193 - RNA, 30 nt, synthetic construct
  source 1..30: mol_type = other RNA
agtgtttaccttatctgcttacgtagtacc

SEQ ID NO: 3194 - RNA, 40 nt, synthetic construct
  source 1..40: mol_type = other RNA
ataccctaatgacctgtcctttactctcggccggcagtat

SEQ ID NO: 3195 - RNA, 20 nt, synthetic construct
  source 1..20: mol_type = other RNA
ataggcgatttccgtccaag

SEQ ID NO: 3196 - RNA, 15 nt, synthetic construct
  source 1..15: mol_type = other RNA
atatgcatcgctcaa

SEQ ID NO: 3197 - RNA, 20 nt, synthetic construct
  source 1..20: mol_type = other RNA
atcagcgtcttgcctggacc

SEQ ID NO: 3198 - RNA, 28 nt, synthetic construct
  source 1..28: mol_type = other RNA
atcccttgcttccccacgggtaagctcg

SEQ ID NO: 3199 - RNA, 22 nt, synthetic construct
  source 1..22: mol_type = other RNA
atctcgccacggacactggtcc

SEQ ID NO: 3200 - RNA, 15 nt, synthetic construct
  source 1..15: mol_type = other RNA
atctgcgtagttact

SEQ ID NO: 3201 - RNA, 22 nt, synthetic construct
  source 1..22: mol_type = other RNA
atgagtccaggccatgtgaaac

SEQ ID NO: 3202 - RNA, 20 nt, synthetic construct
  source 1..20: mol_type = other RNA
atgcagacctgccacgctag

SEQ ID NO: 3203 - RNA, 15 nt, synthetic construct
  source 1..15: mol_type = other RNA
atgccaatggggcaa

SEQ ID NO: 3204 - RNA, 30 nt, synthetic construct
  source 1..30: mol_type = other RNA
attcatgtgttcgattctccctcgggcaca

SEQ ID NO: 3205 - RNA, 22 nt, synthetic construct
  source 1..22: mol_type = other RNA
attgctcaggcgaacccgtagc

SEQ ID NO: 3206 - RNA, 15 nt, synthetic construct
  source 1..15: mol_type = other RNA
caaatcgatgatcct

SEQ ID NO: 3207 - RNA, 15 nt, synthetic construct
  source 1..15: mol_type = other RNA
cacctgcccagctgt

SEQ ID NO: 3208 - RNA, 28 nt, synthetic construct
  source 1..28: mol_type = other RNA
cacgagctccgccaagtgaccaccgatg

SEQ ID NO: 3209 - RNA, 20 nt, synthetic construct
  source 1..20: mol_type = other RNA
cacggccgggccgccgctct

SEQ ID NO: 3210 - RNA, 30 nt, synthetic construct
  source 1..30: mol_type = other RNA
cacgtgcgcttcgggtttcgttcgccgatt

SEQ ID NO: 3211 - RNA, 15 nt, synthetic construct
  source 1..15: mol_type = other RNA
cactacggacagggc

SEQ ID NO: 3212 - RNA, 18 nt, synthetic construct
  source 1..18: mol_type = other RNA
cactataggtatgcaatg

SEQ ID NO: 3213 - RNA, 25 nt, synthetic construct
  source 1..25: mol_type = other RNA
cactgcaccgcttcggtctgcggcc

SEQ ID NO: 3214 - RNA, 18 nt, synthetic construct
  source 1..18: mol_type = other RNA
cagccccgggacggccgc

SEQ ID NO: 3215 - RNA, 10 nt, synthetic construct
  source 1..10: mol_type = other RNA
cagcctaggc

SEQ ID NO: 3216 - RNA, 22 nt, synthetic construct
  source 1..22: mol_type = other RNA
catcggccgccggcggttgggg

SEQ ID NO: 3217 - RNA, 22 nt, synthetic construct
  source 1..22: mol_type = other RNA
ccaccgcggcccggggcaggct

SEQ ID NO: 3218 - RNA, 30 nt, synthetic construct
  source 1..30: mol_type = other RNA
ccaggaagaaattagagagaatcttgctca

SEQ ID NO: 3219 - RNA, 10 nt, synthetic construct
  source 1..10: mol_type = other RNA
ccagtgtcag

SEQ ID NO: 3220 - RNA, 30 nt, synthetic construct
  source 1..30: mol_type = other RNA
ccatatcaatcggggcccaggcggtgtctt

SEQ ID NO: 3221 - RNA, 20 nt, synthetic construct
  source 1..20: mol_type = other RNA
ccccgccgccccgtccggcc

SEQ ID NO: 3222 - RNA, 35 nt, synthetic construct
  source 1..35: mol_type = other RNA
ccccggccccgggcccgggagcggcgggccgggtg

SEQ ID NO: 3223 - RNA, 10 nt, synthetic construct
  source 1..10: mol_type = other RNA
cccgccggtg

SEQ ID NO: 3224 - RNA, 20 nt, synthetic construct
  source 1..20: mol_type = other RNA
cccggaatccggccgtacca

SEQ ID NO: 3225 - RNA, 15 nt, synthetic construct
  source 1..15: mol_type = other RNA
cccggcgccacccgg

SEQ ID NO: 3226 - RNA, 25 nt, synthetic construct
  source 1..25: mol_type = other RNA
cccggcgcctgagcccggccgccga

SEQ ID NO: 3227 - RNA, 25 nt, synthetic construct
  source 1..25: mol_type = other RNA
cccggggccttggggctgcctcgcc

SEQ ID NO: 3228 - RNA, 22 nt, synthetic construct
  source 1..22: mol_type = other RNA
cccgtaacgcccacccgcgaac

SEQ ID NO: 3229 - RNA, 20 nt, synthetic construct
  source 1..20: mol_type = other RNA
cccgtcgcggaggagggtag

SEQ ID NO: 3230 - RNA, 28 nt, synthetic construct
  source 1..28: mol_type = other RNA
cccgtgccctcggtcacgccgacttcac

SEQ ID NO: 3231 - RNA, 10 nt, synthetic construct
  source 1..10: mol_type = other RNA
cccttgccgg

SEQ ID NO: 3232 - RNA, 25 nt, synthetic construct
  source 1..25: mol_type = other RNA
ccgaggccgaaaccggaaactacca

SEQ ID NO: 3233 - RNA, 20 nt, synthetic construct
  source 1..20: mol_type = other RNA
ccgaggtctagggtgtccga

SEQ ID NO: 3234 - RNA, 22 nt, synthetic construct
  source 1..22: mol_type = other RNA
ccgatcccggcccgcccgcgcc

SEQ ID NO: 3235 - RNA, 20 nt, synthetic construct
  source 1..20: mol_type = other RNA
ccgcactcggcccgtggggc

SEQ ID NO: 3236 - RNA, 28 nt, synthetic construct
  source 1..28: mol_type = other RNA
ccgcccgtcgtggaggcgggctgcagct

SEQ ID NO: 3237 - RNA, 35 nt, synthetic construct
  source 1..35: mol_type = other RNA
ccgccgagcggccaccctagggctggcggcgcggg

SEQ ID NO: 3238 - RNA, 40 nt, synthetic construct
  source 1..40: mol_type = other RNA
ccgcgaggctcgtcgcgctgccaaactcgccgggccccgc

SEQ ID NO: 3239 - RNA, 22 nt, synthetic construct
  source 1..22: mol_type = other RNA
ccgcgccgcggaggcgggcggc

SEQ ID NO: 3240 - RNA, 18 nt, synthetic construct
  source 1..18: mol_type = other RNA
ccgcgcggaggttacggc

SEQ ID NO: 3241 - RNA, 40 nt, synthetic construct
  source 1..40: mol_type = other RNA
ccgcgcgggcacggccgggccgcgcctggcgcgccggcgc

SEQ ID NO: 3242 - RNA, 35 nt, synthetic construct
  source 1..35: mol_type = other RNA
ccgcgcgtgccaggccccgacgggaggccccagcg

SEQ ID NO: 3243 - RNA, 10 nt, synthetic construct
  source 1..10: mol_type = other RNA
ccgcgctggc

SEQ ID NO: 3244 - RNA, 15 nt, synthetic construct
  source 1..15: mol_type = other RNA
ccgcttgcgaacaat

SEQ ID NO: 3245 - RNA, 22 nt, synthetic construct
  source 1..22: mol_type = other RNA
ccggcccctgaggccgggcccc

SEQ ID NO: 3246 - RNA, 20 nt, synthetic construct
  source 1..20: mol_type = other RNA
ccggcctggccttctaaagg

SEQ ID NO: 3247 - RNA, 30 nt, synthetic construct
  source 1..30: mol_type = other RNA
ccggcgccacaggccgtgccgctgcggggc

SEQ ID NO: 3248 - RNA, 10 nt, synthetic construct
  source 1..10: mol_type = other RNA
ccggcggaca

SEQ ID NO: 3249 - RNA, 25 nt, synthetic construct
  source 1..25: mol_type = other RNA
ccggctccgtagcgatcgaagctag

SEQ ID NO: 3250 - RNA, 30 nt, synthetic construct
  source 1..30: mol_type = other RNA
ccggctcgcaggctgggccgataccgtcga

SEQ ID NO: 3251 - RNA, 28 nt, synthetic construct
  source 1..28: mol_type = other RNA
ccgggaggtggccgttgttgcgcgccgt

SEQ ID NO: 3252 - RNA, 35 nt, synthetic construct
  source 1..35: mol_type = other RNA
ccggggaacggcttccccggcggcccggctcgtac

SEQ ID NO: 3253 - RNA, 15 nt, synthetic construct
  source 1..15: mol_type = other RNA
ccggtagcacgtccg

SEQ ID NO: 3254 - RNA, 25 nt, synthetic construct
  source 1..25: mol_type = other RNA
ccgtagtattgacacctactgccat

SEQ ID NO: 3255 - RNA, 10 nt, synthetic construct
  source 1..10: mol_type = other RNA
ccgtcctccg

SEQ ID NO: 3256 - RNA, 20 nt, synthetic construct
  source 1..20: mol_type = other RNA
cctatacacggccgcccgca

SEQ ID NO: 3257 - RNA, 15 nt, synthetic construct
  source 1..15: mol_type = other RNA
cctcggtgacccgca

SEQ ID NO: 3258 - RNA, 15 nt, synthetic construct
  source 1..15: mol_type = other RNA
cctgagcctcgtggc

SEQ ID NO: 3259 - RNA, 25 nt, synthetic construct
  source 1..25: mol_type = other RNA
ccttaagcgttattgtcccctttaa

SEQ ID NO: 3260 - RNA, 20 nt, synthetic construct
  source 1..20: mol_type = other RNA
ccttatcatctttaagtttc

SEQ ID NO: 3261 - RNA, 30 nt, synthetic construct
  source 1..30: mol_type = other RNA
cgacaggagcgtcgcacacgctcggtctcc

SEQ ID NO: 3262 - RNA, 22 nt, synthetic construct
  source 1..22: mol_type = other RNA
cgacctattgggacgcggagcg

SEQ ID NO: 3263 - RNA, 25 nt, synthetic construct
  source 1..25: mol_type = other RNA
cgactgctcggcgcagcccacaagg

SEQ ID NO: 3264 - RNA, 15 nt, synthetic construct
  source 1..15: mol_type = other RNA
cgaggccagggcggc

SEQ ID NO: 3265 - RNA, 35 nt, synthetic construct
  source 1..35: mol_type = other RNA
cgccaccgggttctccggtacctgcggcttggccc

SEQ ID NO: 3266 - RNA, 28 nt, synthetic construct
  source 1..28: mol_type = other RNA
cgcccaggtccaataggtgaaatatgct

SEQ ID NO: 3267 - RNA, 40 nt, synthetic construct
  source 1..40: mol_type = other RNA
cgccccagcccgcgccggcccgcgcccaatgcccgcgcgc

SEQ ID NO: 3268 - RNA, 25 nt, synthetic construct
  source 1..25: mol_type = other RNA
cgccccgatcctcgtggccgctcgg

SEQ ID NO: 3269 - RNA, 28 nt, synthetic construct
  source 1..28: mol_type = other RNA
cgccccgggccggggaggctgagcgggc

SEQ ID NO: 3270 - RNA, 28 nt, synthetic construct
  source 1..28: mol_type = other RNA
cgccgcgcaccgcgcgtggcgtccccgg

SEQ ID NO: 3271 - RNA, 18 nt, synthetic construct
  source 1..18: mol_type = other RNA
cgccggagcggccgggta

SEQ ID NO: 3272 - RNA, 20 nt, synthetic construct
  source 1..20: mol_type = other RNA
cgcgccggccgtcgcccagc

SEQ ID NO: 3273 - RNA, 25 nt, synthetic construct
  source 1..25: mol_type = other RNA
cgcgcgcgctgcggagggtggtagg

SEQ ID NO: 3274 - RNA, 35 nt, synthetic construct
  source 1..35: mol_type = other RNA
cgcgctagcgggaccggatgtcccctgccctactt

SEQ ID NO: 3275 - RNA, 35 nt, synthetic construct
  source 1..35: mol_type = other RNA
cgcggcggccggcaccgcgtcgcgcgctggcggcg

SEQ ID NO: 3276 - RNA, 28 nt, synthetic construct
  source 1..28: mol_type = other RNA
cgcgggagccggccgccggcgccgcccc

SEQ ID NO: 3277 - RNA, 25 nt, synthetic construct
  source 1..25: mol_type = other RNA
cgcgtccgctgccggcgggcgacgc

SEQ ID NO: 3278 - RNA, 25 nt, synthetic construct
  source 1..25: mol_type = other RNA
cgctccgcgaggaacccctccttcg

SEQ ID NO: 3279 - RNA, 10 nt, synthetic construct
  source 1..10: mol_type = other RNA
cgctcgctcg

SEQ ID NO: 3280 - RNA, 30 nt, synthetic construct
  source 1..30: mol_type = other RNA
cggagatcttgctaagacaaatgcaagatt

SEQ ID NO: 3281 - RNA, 40 nt, synthetic construct
  source 1..40: mol_type = other RNA
cggcagactcgcgcgtgggccgggccccgtccgggcgacg

SEQ ID NO: 3282 - RNA, 18 nt, synthetic construct
  source 1..18: mol_type = other RNA
cggccaccagcgcgcgat

SEQ ID NO: 3283 - RNA, 18 nt, synthetic construct
  source 1..18: mol_type = other RNA
cggcgcgctgtacgaggg

SEQ ID NO: 3284 - RNA, 28 nt, synthetic construct
  source 1..28: mol_type = other RNA
cggctacgtcccgggacgtgccccgtgc

SEQ ID NO: 3285 - RNA, 15 nt, synthetic construct
  source 1..15: mol_type = other RNA
cggctggtcgccggg

SEQ ID NO: 3286 - RNA, 30 nt, synthetic construct
  source 1..30: mol_type = other RNA
cgggaggctggggcgcggggcccggcgcac

SEQ ID NO: 3287 - RNA, 15 nt, synthetic construct
  source 1..15: mol_type = other RNA
cgggccccgcgtgcg

SEQ ID NO: 3288 - RNA, 25 nt, synthetic construct
  source 1..25: mol_type = other RNA
cgggccgcacccgacaccaccgcaa

SEQ ID NO: 3289 - RNA, 18 nt, synthetic construct
  source 1..18: mol_type = other RNA
cggggagctccgctgatg

SEQ ID NO: 3290 - RNA, 25 nt, synthetic construct
  source 1..25: mol_type = other RNA
cggtaatggcactctaaccgccctc

SEQ ID NO: 3291 - RNA, 22 nt, synthetic construct
  source 1..22: mol_type = other RNA
cggtccgcgcgcagcgactttc

SEQ ID NO: 3292 - RNA, 15 nt, synthetic construct
  source 1..15: mol_type = other RNA
cggtccggcccgggg

SEQ ID NO: 3293 - RNA, 18 nt, synthetic construct
  source 1..18: mol_type = other RNA
cggtgttcgggaagatcg

SEQ ID NO: 3294 - RNA, 25 nt, synthetic construct
  source 1..25: mol_type = other RNA
cgtagggcttcagtgtacccgtgca

SEQ ID NO: 3295 - RNA, 28 nt, synthetic construct
  source 1..28: mol_type = other RNA
cgtatcatattaaataccaacgagatat

SEQ ID NO: 3296 - RNA, 20 nt, synthetic construct
  source 1..20: mol_type = other RNA
cgtcgatgggtccgacgccc

SEQ ID NO: 3297 - RNA, 15 nt, synthetic construct
  source 1..15: mol_type = other RNA
cgtgccgcgcgtgtc

SEQ ID NO: 3298 - RNA, 25 nt, synthetic construct
  source 1..25: mol_type = other RNA
cgtgggtcgcaacacggcccctcag

SEQ ID NO: 3299 - RNA, 22 nt, synthetic construct
  source 1..22: mol_type = other RNA
cgtgggtcgtccgctgttagga

SEQ ID NO: 3300 - RNA, 35 nt, synthetic construct
  source 1..35: mol_type = other RNA
cgttctggcgagccgcgcggcgtgccgggagggga

SEQ ID NO: 3301 - RNA, 28 nt, synthetic construct
  source 1..28: mol_type = other RNA
ctaagatgtagcccttggtaataggtaa

SEQ ID NO: 3302 - RNA, 28 nt, synthetic construct
  source 1..28: mol_type = other RNA
ctagaatgacttatgcgatagagtgcta

SEQ ID NO: 3303 - RNA, 10 nt, synthetic construct
  source 1..10: mol_type = other RNA
ctagcactgc

SEQ ID NO: 3304 - RNA, 30 nt, synthetic construct
  source 1..30: mol_type = other RNA
ctatcatgcatggcgatcccaggttcgcgc

SEQ ID NO: 3305 - RNA, 22 nt, synthetic construct
  source 1..22: mol_type = other RNA
ctcagagcagcactgagtcggc

SEQ ID NO: 3306 - RNA, 28 nt, synthetic construct
  source 1..28: mol_type = other RNA
ctcccctcgtatcgagcgtgatctctcc

SEQ ID NO: 3307 - RNA, 30 nt, synthetic construct
  source 1..30: mol_type = other RNA
ctccgttcttcggcgcgctgagtccgccat

SEQ ID NO: 3308 - RNA, 20 nt, synthetic construct
  source 1..20: mol_type = other RNA
ctcgtcactggatgtgaagt

SEQ ID NO: 3309 - RNA, 20 nt, synthetic construct
  source 1..20: mol_type = other RNA
ctctctcttctgactcgctt

SEQ ID NO: 3310 - RNA, 30 nt, synthetic construct
  source 1..30: mol_type = other RNA
ctgctagggcggtacgccggcggggcgctg

SEQ ID NO: 3311 - RNA, 30 nt, synthetic construct
  source 1..30: mol_type = other RNA
ctggacgaggtcgtggcggtcgagtaaggc

SEQ ID NO: 3312 - RNA, 30 nt, synthetic construct
  source 1..30: mol_type = other RNA
ctgtacccgtagccgcggccccatccgagg

SEQ ID NO: 3313 - RNA, 15 nt, synthetic construct
  source 1..15: mol_type = other RNA
ctttacatcagaatt

SEQ ID NO: 3314 - RNA, 25 nt, synthetic construct
  source 1..25: mol_type = other RNA
gaaagtaattacaccttacctatca

SEQ ID NO: 3315 - RNA, 10 nt, synthetic construct
  source 1..10: mol_type = other RNA
gaagccgtac

SEQ ID NO: 3316 - RNA, 18 nt, synthetic construct
  source 1..18: mol_type = other RNA
gacgacataagtacccca

SEQ ID NO: 3317 - RNA, 18 nt, synthetic construct
  source 1..18: mol_type = other RNA
gacgctcggaccggatag

SEQ ID NO: 3318 - RNA, 30 nt, synthetic construct
  source 1..30: mol_type = other RNA
gacggaggccgggatgccttcgccgctcag

SEQ ID NO: 3319 - RNA, 28 nt, synthetic construct
  source 1..28: mol_type = other RNA
gacggcccgcgtgactgcgacccacagc

SEQ ID NO: 3320 - RNA, 15 nt, synthetic construct
  source 1..15: mol_type = other RNA
gacgtcgttgtgtgc

SEQ ID NO: 3321 - RNA, 25 nt, synthetic construct
  source 1..25: mol_type = other RNA
gagagatatattcgactcttcccta

SEQ ID NO: 3322 - RNA, 30 nt, synthetic construct
  source 1..30: mol_type = other RNA
gagggcgaacgacccgtccctctgcgggtt

SEQ ID NO: 3323 - RNA, 18 nt, synthetic construct
  source 1..18: mol_type = other RNA
gaggttcccacccgtagt

SEQ ID NO: 3324 - RNA, 15 nt, synthetic construct
  source 1..15: mol_type = other RNA
gagtgcgatgcacag

SEQ ID NO: 3325 - RNA, 35 nt, synthetic construct
  source 1..35: mol_type = other RNA
gataatctttaacaacgtgaagaattcatgtttga

SEQ ID NO: 3326 - RNA, 35 nt, synthetic construct
  source 1..35: mol_type = other RNA
gatatgatactgaacgcccctagtgccaatggacc

SEQ ID NO: 3327 - RNA, 30 nt, synthetic construct
  source 1..30: mol_type = other RNA
gatttgataatctcgtatatagagcagtta

SEQ ID NO: 3328 - RNA, 28 nt, synthetic construct
  source 1..28: mol_type = other RNA
gcaatgcaccgccgtgggcgccgtatcg

SEQ ID NO: 3329 - RNA, 40 nt, synthetic construct
  source 1..40: mol_type = other RNA
gcacatgtccacgccagcagcgccaggtggcggacaggga

SEQ ID NO: 3330 - RNA, 30 nt, synthetic construct
  source 1..30: mol_type = other RNA
gcacgctctcgtcggtccgccctgcgccgg

SEQ ID NO: 3331 - RNA, 18 nt, synthetic construct
  source 1..18: mol_type = other RNA
gcagataatcgatagagt

SEQ ID NO: 3332 - RNA, 35 nt, synthetic construct
  source 1..35: mol_type = other RNA
gcatcggacgctgcgacggcgccggccccggcagt

SEQ ID NO: 3333 - RNA, 30 nt, synthetic construct
  source 1..30: mol_type = other RNA
gcatgatgtgagatccaacgtttattcttc

SEQ ID NO: 3334 - RNA, 25 nt, synthetic construct
  source 1..25: mol_type = other RNA
gcatgcacaggcacaatgtctgttt

SEQ ID NO: 3335 - RNA, 25 nt, synthetic construct
  source 1..25: mol_type = other RNA
gccaggccccgaccgctggagcgcg

SEQ ID NO: 3336 - RNA, 22 nt, synthetic construct
  source 1..22: mol_type = other RNA
gccccacgccacggcatttcca

SEQ ID NO: 3337 - RNA, 18 nt, synthetic construct
  source 1..18: mol_type = other RNA
gcccgacagcgcgcgcat

SEQ ID NO: 3338 - RNA, 18 nt, synthetic construct
  source 1..18: mol_type = other RNA
gcccgctcccgccgcccg

SEQ ID NO: 3339 - RNA, 25 nt, synthetic construct
  source 1..25: mol_type = other RNA
gccgccccggggacgtcccgttgcc

SEQ ID NO: 3340 - RNA, 20 nt, synthetic construct
  source 1..20: mol_type = other RNA
gccggagcagggccgactgg

SEQ ID NO: 3341 - RNA, 25 nt, synthetic construct
  source 1..25: mol_type = other RNA
gccgtcgtggaggcaaggcctgcgt

SEQ ID NO: 3342 - RNA, 35 nt, synthetic construct
  source 1..35: mol_type = other RNA
gcctcccgctcacactccaaccggctgcgggcacg

SEQ ID NO: 3343 - RNA, 15 nt, synthetic construct
  source 1..15: mol_type = other RNA
gcctccgcccaccgc

SEQ ID NO: 3344 - RNA, 20 nt, synthetic construct
  source 1..20: mol_type = other RNA
gcctgagattcgaagccgct

SEQ ID NO: 3345 - RNA, 40 nt, synthetic construct
  source 1..40: mol_type = other RNA
gcctgcacccttgctcctcgacgagggcccgcaccggtcg

SEQ ID NO: 3346 - RNA, 25 nt, synthetic construct
  source 1..25: mol_type = other RNA
gcgaaacctcaggtcgccgtttcct

SEQ ID NO: 3347 - RNA, 30 nt, synthetic construct
  source 1..30: mol_type = other RNA
gcgagctagggccaagcctgtggcggtcca

SEQ ID NO: 3348 - RNA, 22 nt, synthetic construct
  source 1..22: mol_type = other RNA
gcgagtgccagtcgcccggggc

SEQ ID NO: 3349 - RNA, 25 nt, synthetic construct
  source 1..25: mol_type = other RNA
gcgcgatgtcagctacaccacttcg

SEQ ID NO: 3350 - RNA, 30 nt, synthetic construct
  source 1..30: mol_type = other RNA
gcgcgctgaccggcgcggccaccacccggg

SEQ ID NO: 3351 - RNA, 30 nt, synthetic construct
  source 1..30: mol_type = other RNA
gcgcggcgtctactcctcgcctctacctcg

SEQ ID NO: 3352 - RNA, 20 nt, synthetic construct
  source 1..20: mol_type = other RNA
gcggagacagttcttagatc

SEQ ID NO: 3353 - RNA, 15 nt, synthetic construct
  source 1..15: mol_type = other RNA
gcggattgaacacga

SEQ ID NO: 3354 - RNA, 15 nt, synthetic construct
  source 1..15: mol_type = other RNA
gcggcaagaatgtcc

SEQ ID NO: 3355 - RNA, 40 nt, synthetic construct
  source 1..40: mol_type = other RNA
gcggccttaagttcgctctcaccccgtcgtcaccaggacc

SEQ ID NO: 3356 - RNA, 18 nt, synthetic construct
  source 1..18: mol_type = other RNA
gcgtgtaacgcgcgggct

SEQ ID NO: 3357 - RNA, 18 nt, synthetic construct
  source 1..18: mol_type = other RNA
gctacggccggagtgttc

SEQ ID NO: 3358 - RNA, 30 nt, synthetic construct
  source 1..30: mol_type = other RNA
gctccgcatggtctctgaacggacgaccgg

SEQ ID NO: 3359 - RNA, 35 nt, synthetic construct
  source 1..35: mol_type = other RNA
gctctcttggcagcggcttccccacttctgggcgc

SEQ ID NO: 3360 - RNA, 30 nt, synthetic construct
  source 1..30: mol_type = other RNA
gctctttcagcggctaaatcttagagcgag

SEQ ID NO: 3361 - RNA, 15 nt, synthetic construct
  source 1..15: mol_type = other RNA
ggacggcccgtacat

SEQ ID NO: 3362 - RNA, 20 nt, synthetic construct
  source 1..20: mol_type = other RNA
ggactatccctccatggcgt

SEQ ID NO: 3363 - RNA, 25 nt, synthetic construct
  source 1..25: mol_type = other RNA
ggaggctcgcaccgaaatcagcgac

SEQ ID NO: 3364 - RNA, 20 nt, synthetic construct
  source 1..20: mol_type = other RNA
ggatcgtccctcaggggcag

SEQ ID NO: 3365 - RNA, 28 nt, synthetic construct
  source 1..28: mol_type = other RNA
ggatgtccattggaccgcgcttcggtgc

SEQ ID NO: 3366 - RNA, 30 nt, synthetic construct
  source 1..30: mol_type = other RNA
ggattccggtacccgcggggtggccttgga

SEQ ID NO: 3367 - RNA, 18 nt, synthetic construct
  source 1..18: mol_type = other RNA
ggcaccccggcgtgcgcg

SEQ ID NO: 3368 - RNA, 28 nt, synthetic construct
  source 1..28: mol_type = other RNA
ggcaccggggcaccgccaccccacgcgg

SEQ ID NO: 3369 - RNA, 25 nt, synthetic construct
  source 1..25: mol_type = other RNA
ggcagcgggctcggggacccgtgag

SEQ ID NO: 3370 - RNA, 35 nt, synthetic construct
  source 1..35: mol_type = other RNA
ggccgatgccagtgacccgttcaacgggccgggcg

SEQ ID NO: 3371 - RNA, 28 nt, synthetic construct
  source 1..28: mol_type = other RNA
ggccggccctgcctccgctccggtgcgc

SEQ ID NO: 3372 - RNA, 25 nt, synthetic construct
  source 1..25: mol_type = other RNA
ggccgggcctcgcggggcgcccggg

SEQ ID NO: 3373 - RNA, 30 nt, synthetic construct
  source 1..30: mol_type = other RNA
ggccgggcgtcgcggcccggtgcggccggc

SEQ ID NO: 3374 - RNA, 25 nt, synthetic construct
  source 1..25: mol_type = other RNA
ggcgaagcatagagtctccgcttcc

SEQ ID NO: 3375 - RNA, 30 nt, synthetic construct
  source 1..30: mol_type = other RNA
ggcgccggcctgggagcccgggcctgggcc

SEQ ID NO: 3376 - RNA, 28 nt, synthetic construct
  source 1..28: mol_type = other RNA
ggcggcgggagcggcccgtacgacgggg

SEQ ID NO: 3377 - RNA, 18 nt, synthetic construct
  source 1..18: mol_type = other RNA
ggctcctcctcgcgcggg

SEQ ID NO: 3378 - RNA, 38 nt, synthetic construct; identical to SEQ ID NO: 2691
  source 1..38: mol_type = other RNA

SEQ ID NO: 3379 - RNA, 22 nt, synthetic construct
  source 1..22: mol_type = other RNA
gggaccatatggtaccacctgg

SEQ ID NO: 3380 - RNA, 20 nt, synthetic construct
  source 1..20: mol_type = other RNA
gggaccccggtgtccccttt

SEQ ID NO: 3381 - RNA, 20 nt, synthetic construct
  source 1..20: mol_type = other RNA
gggactacactagggcggag

SEQ ID NO: 3382 - RNA, 30 nt, synthetic construct
  source 1..30: mol_type = other RNA
gggcccggtccacctgggaccttcggcgcc

SEQ ID NO: 3383 - RNA, 25 nt, synthetic construct
  source 1..25: mol_type = other RNA
gggccgaaccggacctacggccacg

SEQ ID NO: 3384 - RNA, 25 nt, synthetic construct
  source 1..25: mol_type = other RNA
gggccgtgggagcctccgtcaccac

SEQ ID NO: 3385 - RNA, 20 nt, synthetic construct
  source 1..20: mol_type = other RNA
gggcgcacatcggcggcccg

SEQ ID NO: 3386 - RNA, 18 nt, synthetic construct
  source 1..18: mol_type = other RNA
gggcggccactggggagc

SEQ ID NO: 3387 - RNA, 22 nt, synthetic construct
  source 1..22: mol_type = other RNA
ggggccctccgacccgcctagg

SEQ ID NO: 3388 - RNA, 20 nt, synthetic construct
  source 1..20: mol_type = other RNA
ggggcgcgcacaggcgacct

SEQ ID NO: 3389 - RNA, 22 nt, synthetic construct
  source 1..22: mol_type = other RNA
gggtcgttattctacccatcct

SEQ ID NO: 3390 - RNA, 35 nt, synthetic construct
  source 1..35: mol_type = other RNA
gggtgccatcttcctgggtagaggcgggacatgcg

SEQ ID NO: 3391 - RNA, 30 nt, synthetic construct
  source 1..30: mol_type = other RNA
ggtagagaagtgacataatctttgttgtcg

SEQ ID NO: 3392 - RNA, 10 nt, synthetic construct
  source 1..10: mol_type = other RNA
ggtccccgct

SEQ ID NO: 3393 - RNA, 20 nt, synthetic construct
  source 1..20: mol_type = other RNA
ggtcgcaactgtgtgcacct

SEQ ID NO: 3394 - RNA, 15 nt, synthetic construct
  source 1..15: mol_type = other RNA
ggtcgggagtgacct

SEQ ID NO: 3395 - RNA, 10 nt, synthetic construct
  source 1..10: mol_type = other RNA
ggtgccgcag

SEQ ID NO: 3396 - RNA, 40 nt, synthetic construct
  source 1..40: mol_type = other RNA
ggtgttcccaagcgaagtccctctggcaaaggtgaggagg

SEQ ID NO: 3397 - RNA, 30 nt, synthetic construct
  source 1..30: mol_type = other RNA
gtaatccaagctcactaggggcacaacttg

SEQ ID NO: 3398 - RNA, 18 nt, synthetic construct
  source 1..18: mol_type = other RNA
gtacatggcagagagcaa

SEQ ID NO: 3399 - RNA, 15 nt, synthetic construct
  source 1..15: mol_type = other RNA
gtatggttaattgcc

SEQ ID NO: 3400 - RNA, 20 nt, synthetic construct
  source 1..20: mol_type = other RNA
gtcgcggtcactcgcgggat

SEQ ID NO: 3401 - RNA, 20 nt, synthetic construct
  source 1..20: mol_type = other RNA
gtgccggagcgcgggccaca

SEQ ID NO: 3402 - RNA, 15 nt, synthetic construct
  source 1..15: mol_type = other RNA
gtgcgcctgtggcgc

SEQ ID NO: 3403 - RNA, 15 nt, synthetic construct
  source 1..15: mol_type = other RNA
gtggtccgactcgag

SEQ ID NO: 3404 - RNA, 30 nt, synthetic construct
  source 1..30: mol_type = other RNA
gtgtctcatgtttccttgtattacgttacc

SEQ ID NO: 3405 - RNA, 25 nt, synthetic construct
  source 1..25: mol_type = other RNA
gtgtggagctatctaggaatacgca

SEQ ID NO: 3406 - RNA, 35 nt, synthetic construct
  source 1..35: mol_type = other RNA
gtgttgagcccgcgaggtcgttcggcggtaacggt

SEQ ID NO: 3407 - RNA, 35 nt, synthetic construct
  source 1..35: mol_type = other RNA
taatgcagcaacggtcgcgactccctgtgactgcg

SEQ ID NO: 3408 - RNA, 18 nt, synthetic construct
  source 1..18: mol_type = other RNA
tacccggcgtccgcgtcc

SEQ ID NO: 3409 - RNA, 35 nt, synthetic construct
  source 1..35: mol_type = other RNA
tagcacgtggtttcgcccttctggctacctagggg

SEQ ID NO: 3410 - RNA, 28 nt, synthetic construct
  source 1..28: mol_type = other RNA
taggggtcgcctgggtgctcgagggcgt

SEQ ID NO: 3411 - RNA, 28 nt, synthetic construct
  source 1..28: mol_type = other RNA
tatagtgtgttgattccatcgttgcaga

SEQ ID NO: 3412 - RNA, 20 nt, synthetic construct
  source 1..20: mol_type = other RNA
tatatgcattaccccgatac

SEQ ID NO: 3413 - RNA, 35 nt, synthetic construct
  source 1..35: mol_type = other RNA
tatcagcggtacccttaacaaagtctctttgagaa

SEQ ID NO: 3414 - RNA, 25 nt, synthetic construct
  source 1..25: mol_type = other RNA
tcaagtcaggaaatatagagctgac

SEQ ID NO: 3415 - RNA, 18 nt, synthetic construct
  source 1..18: mol_type = other RNA
tcagaaaccggcgtagaa

SEQ ID NO: 3416 - RNA, 22 nt, synthetic construct
  source 1..22: mol_type = other RNA
tcatacacagagcaaactccaa

SEQ ID NO: 3417 - RNA, 35 nt, synthetic construct
  source 1..35: mol_type = other RNA
tcgagccgcgtgagtcattgtactctacggcggtc

SEQ ID NO: 3418 - RNA, 30 nt, synthetic construct
  source 1..30: mol_type = other RNA
tcggccccgcgccaggggcgcgatccgccg

SEQ ID NO: 3419 - RNA, 15 nt, synthetic construct
  source 1..15: mol_type = other RNA
tcggccccgcgtgca

SEQ ID NO: 3420 - RNA, 35 nt, synthetic construct
  source 1..35: mol_type = other RNA
tcggcgccccgggcgtggccggcgtgcaggccgac

SEQ ID NO: 3421 - RNA, 28 nt, synthetic construct
  source 1..28: mol_type = other RNA
tcggcggacggaccgctgcgcagggctt

SEQ ID NO: 3422 - RNA, 20 nt, synthetic construct
  source 1..20: mol_type = other RNA
tcggtgaggcccggccaggc

SEQ ID NO: 3423 - RNA, 23 nt, synthetic construct
  source 1..23: mol_type = other RNA
tcgtggtctcgggcatcagaccc

SEQ ID NO: 3424 - RNA, 22 nt, synthetic construct
  source 1..22: mol_type = other RNA
tcttctagcacttgatgttcct

SEQ ID NO: 3425 - RNA, 25 nt, synthetic construct
  source 1..25: mol_type = other RNA
tgaagtgggttactgagaccctaag

SEQ ID NO: 3426 - RNA, 22 nt, synthetic construct
  source 1..22: mol_type = other RNA
tgacccgggccgcccgcgaggc

SEQ ID NO: 3427 - RNA, 20 nt, synthetic construct
  source 1..20: mol_type = other RNA
tgagataacaaatgtcccgt

SEQ ID NO: 3428 - RNA, 15 nt, synthetic construct
  source 1..15: mol_type = other RNA
tgatccatagctaca

SEQ ID NO: 3429 - RNA, 35 nt, synthetic construct
  source 1..35: mol_type = other RNA
tgatttgtgacgggtaaacagataattagccatcc

SEQ ID NO: 3430 - RNA, 28 nt, synthetic construct
  source 1..28: mol_type = other RNA
tgcaccattcaatcgttccttgtcctgg

SEQ ID NO: 3431 - RNA, 30 nt, synthetic construct
  source 1..30: mol_type = other RNA
tgcaggaggccgtccgccggacgggtgggc

SEQ ID NO: 3432 - RNA, 38 nt, synthetic construct; identical to SEQ ID NO: 2715
  source 1..38: mol_type = other RNA

SEQ ID NO: 3433 - RNA, 22 nt, synthetic construct
  source 1..22: mol_type = other RNA
tgcccgatctgcgcgccggaaa

SEQ ID NO: 3434 - RNA, 20 nt, synthetic construct
  source 1..20: mol_type = other RNA
tgcgagcgccccgcggggcg

SEQ ID NO: 3435 - RNA, 15 nt, synthetic construct
  source 1..15: mol_type = other RNA
tgctatgctgggctc

SEQ ID NO: 3436 - RNA, 28 nt, synthetic construct
  source 1..28: mol_type = other RNA
tgctgcccgccgcccgtagccacaggcc

SEQ ID NO: 3437 - RNA, 22 nt, synthetic construct
  source 1..22: mol_type = other RNA
tggcggactcggtccgtatagt

SEQ ID NO: 3438 - RNA, 15 nt, synthetic construct
  source 1..15: mol_type = other RNA
tggggtaacgcgcgt

SEQ ID NO: 3439 - RNA, 35 nt, synthetic construct
  source 1..35: mol_type = other RNA
tggtgacagcaccaggtcatggcgttaagtcaaca

SEQ ID NO: 3440 - RNA, 25 nt, synthetic construct
  source 1..25: mol_type = other RNA
tggttaaatgctatggaagcgaact

SEQ ID NO: 3441 - RNA, 22 nt, synthetic construct
  source 1..22: mol_type = other RNA
tgtgcaacttcattgttagata

SEQ ID NO: 3442 - RNA, 20 nt, synthetic construct
  source 1..20: mol_type = other RNA
tgtggcaattgtagccacct

SEQ ID NO: 3443 - RNA, 25 nt, synthetic construct
  source 1..25: mol_type = other RNA
ttacagcctgggcgcgtggacgcat

SEQ ID NO: 3444 - RNA, 22 nt, synthetic construct
  source 1..22: mol_type = other RNA
ttatgatgtgcgtggtatgact

SEQ ID NO: 3445 - RNA, 40 nt, synthetic construct
  source 1..40: mol_type = other RNA
ttccatagctaacgtatttggtaattacattcaagaagta

SEQ ID NO: 3446 - RNA, 35 nt, synthetic construct
  source 1..35: mol_type = other RNA
ttccgcccgcccgcgcccgggcccagcccgcggcg

SEQ ID NO: 3447 - RNA, 20 nt, synthetic construct
  source 1..20: mol_type = other RNA
ttccggtcggagccctccgg

SEQ ID NO: 3448 - RNA, 28 nt, synthetic construct
  source 1..28: mol_type = other RNA
ttctggaggcacgcgtgcgtcgcttgat

SEQ ID NO: 3449 - RNA, 18 nt, synthetic construct
  source 1..18: mol_type = other RNA
ttcttgcggtgcggaccg

SEQ ID NO: 3450 - RNA, 22 nt, synthetic construct
  source 1..22: mol_type = other RNA
ttgatgtcgtaggtgataccgc

SEQ ID NO: 3451 - RNA, 38 nt, synthetic construct; identical to SEQ ID NO: 2723
  source 1..38: mol_type = other RNA

SEQ ID NO: 3452 - RNA, 15 nt, synthetic construct
  source 1..15: mol_type = other RNA
ttggcccaccggccc

SEQ ID NO: 3453 - RNA, 10 nt, synthetic construct
  source 1..10: mol_type = other RNA
ttgtaggggc

SEQ ID NO: 3454 - RNA, 20 nt, synthetic construct
  source 1..20: mol_type = other RNA
ttgtcgtagtgcacaccaac

SEQ ID NO: 3455 - RNA, 40 nt, synthetic construct
  source 1..40: mol_type = other RNA
tttagtaacagacacactagggacggttatacgaacattg

SEQ ID NO: 3456 - RNA, 20 nt, synthetic construct
  source 1..20: mol_type = other RNA
tttagttgggtacagctact

SEQ ID NO: 3457 - RNA, 28 nt, synthetic construct
  source 1..28: mol_type = other RNA
tttccgaattggaaaggttgtcctcgcg

SEQ ID NO: 3458 - RNA, 10 nt, synthetic construct
  source 1..10: mol_type = other RNA
tttccgcttc

SEQ ID NO: 3459 - RNA, 20 nt, synthetic construct
  source 1..20: mol_type = other RNA
aataaatatccaaaccgccg

SEQ ID NO: 3460 - RNA, 25 nt, synthetic construct
  source 1..25: mol_type = other RNA
aggtcaataaatatccaaaccgccg

SEQ ID NO: 3461 - RNA, 30 nt, synthetic construct
  source 1..30: mol_type = other RNA
ggacgaggtcaataaatatccaaaccgccg

SEQ ID NO: 3462 - RNA, 12 nt, synthetic construct
  source 1..12: mol_type = other RNA
ccgaaaaagcgg

SEQ ID NO: 3463 - RNA, 14 nt, synthetic construct
  source 1..14: mol_type = other RNA
ccccgaaaaagcgg

SEQ ID NO: 3464 - RNA, 16 nt, synthetic construct
  source 1..16: mol_type = other RNA
atccccgaaaaagcgg

SEQ ID NO: 3465 - RNA, 18 nt, synthetic construct
  source 1..18: mol_type = other RNA
ggatccccgaaaaagcgg

SEQ ID NO: 3466 - RNA, 20 nt, synthetic construct
  source 1..20: mol_type = other RNA
cgggatccccgaaaaagcgg

SEQ ID NO: 3467 - RNA, 12 nt, synthetic construct
  source 1..12: mol_type = other RNA
tccaaaccgccg

SEQ ID NO: 3468 - RNA, 14 nt, synthetic construct
  source 1..14: mol_type = other RNA
tatccaaaccgccg

SEQ ID NO: 3469 - RNA, 16 nt, synthetic construct
  source 1..16: mol_type = other RNA
aatatccaaaccgccg

SEQ ID NO: 3470 - RNA, 18 nt, synthetic construct
  source 1..18: mol_type = other RNA
taaatatccaaaccgccg

SEQ ID NO: 3471 - RNA, 20 nt, synthetic construct
  source 1..20: mol_type = other RNA
aataaatatccaaaccgccg

SEQ ID NO: 3472 - RNA, 12 nt, synthetic construct
  source 1..12: mol_type = other RNA
acgctccccaga

SEQ ID NO: 3473 - RNA, 14 nt, synthetic construct
  source 1..14: mol_type = other RNA
agacgctccccaga

SEQ ID NO: 3474 - RNA, 16 nt, synthetic construct
  source 1..16: mol_type = other RNA
ccagacgctccccaga

SEQ ID NO: 3475 - RNA, 18 nt, synthetic construct
  source 1..18: mol_type = other RNA
cgccagacgctccccaga

SEQ ID NO: 3476 - RNA, 20 nt, synthetic construct
  source 1..20: mol_type = other RNA
cgcgccagacgctccccaga

SEQ ID NO: 3477 - RNA, 20 nt, synthetic construct
  source 1..20: mol_type = other RNA
ccctagaactgtcttcgact

SEQ ID NO: 3478 - RNA, 25 nt, synthetic construct
  source 1..25: mol_type = other RNA
ctgaaccctagaactgtcttcgact

SEQ ID NO: 3479 - RNA, 30 nt, synthetic construct
  source 1..30: mol_type = other RNA
gctccctgaaccctagaactgtcttcgact

SEQ ID NO: 3480 - RNA, 12 nt, synthetic construct
  source 1..12: mol_type = other RNA
aagactgagtgc

SEQ ID NO: 3481 - RNA, 14 nt, synthetic construct
  source 1..14: mol_type = other RNA
ggaagactgagtgc

SEQ ID NO: 3482 - RNA, 16 nt, synthetic construct
  source 1..16: mol_type = other RNA
ttggaagactgagtgc

SEQ ID NO: 3483 - RNA, 18 nt, synthetic construct
  source 1..18: mol_type = other RNA
cgttggaagactgagtgc

SEQ ID NO: 3484 - RNA, 20 nt, synthetic construct
  source 1..20: mol_type = other RNA
cccgttggaagactgagtgc

SEQ ID NO: 3485 - RNA, 12 nt, synthetic construct
  source 1..12: mol_type = other RNA
ccagtcctgtga

SEQ ID NO: 3486 - RNA, 14 nt, synthetic construct
  source 1..14: mol_type = other RNA
ctccagtcctgtga

SEQ ID NO: 3487 - RNA, 16 nt, synthetic construct
  source 1..16: mol_type = other RNA
agctccagtcctgtga

SEQ ID NO: 3488 - RNA, 18 nt, synthetic construct
  source 1..18: mol_type = other RNA
ccagctccagtcctgtga

SEQ ID NO: 3489 - RNA, 20 nt, synthetic construct
  source 1..20: mol_type = other RNA
gcccagctccagtcctgtga

SEQ ID NO: 3490 - RNA, 12 nt, synthetic construct
  source 1..12: mol_type = other RNA
cgcggccggcga

SEQ ID NO: 3491 - RNA, 14 nt, synthetic construct
  source 1..14: mol_type = other RNA
tccgcggccggcga

SEQ ID NO: 3492 - RNA, 16 nt, synthetic construct
  source 1..16: mol_type = other RNA
ggtccgcggccggcga

SEQ ID NO: 3493 - RNA, 18 nt, synthetic construct
  source 1..18: mol_type = other RNA
cgggtccgcggccggcga

SEQ ID NO: 3494 - RNA, 20 nt, synthetic construct
  source 1..20: mol_type = other RNA
gccgggtccgcggccggcga

SEQ ID NO: 3495 - RNA, 146 nt, synthetic construct
  source 1..146: mol_type = other RNA
gttggaagactgagtgcccggttttagagctagaaatagcaagttaaaataaggctagtccgttatcaacttgaaaaagtggcaccgagtcggtgcatgatcctgacgacggagaccgccgtcgtcgacaagccgcactcagtctt

SEQ ID NO: 3496 - RNA, 146 nt, synthetic construct
  source 1..146: mol_type = other RNA
gcactttgcgaaccaacgatgttttagagctagaaatagcaagttaaaataaggctagtccgttatcaacttgaaaaagtggcaccgagtcggtgcggcttgtcgacgacggcggtctccgtcgtcaggatcatgttggttcgcaa

SEQ ID NO: 3497 - RNA, 215 nt, synthetic construct
  source 1..215: mol_type = other RNA
ccagtcctgtgatccgggcccgccccctagcggccggggagggaggggccgggtccgcggccggcgaacggggctcgaagggtccttgtagccgggaatgctgctgctgctgctggggggatcacagaccatttctttctttcggccaggctgaggccctgacgtggatgggcaaactgcaggcctgggaaggcagcaagccgggccgtccgtgt

SEQ ID NO: 3498 - RNA, 195 nt, synthetic construct
  source 1..195: mol_type = other RNA
gatccgggcccgccccctagcggccggggagggaggggccgggtccgcggccggcgaacggggctcgaagggtccttgtagccgggaatgctgctgctgctgctggggggatcacagaccatttctttctttcggccaggctgaggccctgacgtggatgggcaaactgcaggcctgggaaggcagcaagccggg

SEQ ID NO: 3499 - RNA, 175 nt, synthetic construct
  source 1..175: mol_type = other RNA
cgccccctagcggccggggagggaggggccgggtccgcggccggcgaacggggctcgaagggtccttgtagccgggaatgctgctgctgctgctggggggatcacagaccatttctttctttcggccaggctgaggccctgacgtggatgggcaaactgcaggcctgggaaggca

SEQ ID NO: 3500 - RNA, 155 nt, synthetic construct
  source 1..155: mol_type = other RNA
cggccggggagggaggggccgggtccgcggccggcgaacggggctcgaagggtccttgtagccgggaatgctgctgctgctgctggggggatcacagaccatttctttctttcggccaggctgaggccctgacgtggatgggcaaactgcaggcc

SEQ ID NO: 3501 - RNA, 135 nt, synthetic construct
  source 1..135: mol_type = other RNA
gggaggggccgggtccgcggccggcgaacggggctcgaagggtccttgtagccgggaatgctgctgctgctgctggggggatcacagaccatttctttctttcggccaggctgaggccctgacgtggatgggcaa

SEQ ID NO: 3502 - RNA, 115 nt, synthetic construct
  source 1..115: mol_type = other RNA
gggtccgcggccggcgaacggggctcgaagggtccttgtagccgggaatgctgctgctgctgctggggggatcacagaccatttctttctttcggccaggctgaggccctgacgt

SEQ ID NO: 3503 - RNA, 95 nt, synthetic construct
  source 1..95: mol_type = other RNA
ccggcgaacggggctcgaagggtccttgtagccgggaatgctgctgctgctgctggggggatcacagaccatttctttctttcggccaggctgag

SEQ ID NO: 3504 - RNA, 75 nt, synthetic construct
  source 1..75: mol_type = other RNA
gggctcgaagggtccttgtagccgggaatgctgctgctgctgctggggggatcacagaccatttctttctttcgg

SEQ ID NO: 3505 - RNA, 55 nt, synthetic construct
  source 1..55: mol_type = other RNA
ggtccttgtagccgggaatgctgctgctgctgctggggggatcacagaccatttc

SEQ ID NO: 3506 - RNA, 35 nt, synthetic construct
  source 1..35: mol_type = other RNA
gccgggaatgctgctgctgctgctggggggatcac

SEQ ID NO: 3507 - RNA, 200 nt, synthetic construct
  source 1..200: mol_type = other RNA
ccagtcctgtgatccgggcccgccccctagcggccggggagggaggggccgggtccgcggccggcgaacggggctcgaagggtccttgtagccgggaatggggggatcacagaccatttctttctttcggccaggctgaggccctgacgtggatgggcaaactgcaggcctgggaaggcagcaagccgggccgtccgtgt

SEQ ID NO: 3508 - RNA, 180 nt, synthetic construct
  source 1..180: mol_type = other RNA
gatccgggcccgccccctagcggccggggagggaggggccgggtccgcggccggcgaacggggctcgaagggtccttgtagccgggaatggggggatcacagaccatttctttctttcggccaggctgaggccctgacgtggatgggcaaactgcaggcctgggaaggcagcaagccggg

SEQ ID NO: 3509 - RNA, 160 nt, synthetic construct
  source 1..160: mol_type = other RNA
cgccccctagcggccggggagggaggggccgggtccgcggccggcgaacggggctcgaagggtccttgtagccgggaatggggggatcacagaccatttctttctttcggccaggctgaggccctgacgtggatgggcaaactgcaggcctgggaaggca

SEQ ID NO: 3510 - RNA, 140 nt, synthetic construct
  source 1..140: mol_type = other RNA
cggccggggagggaggggccgggtccgcggccggcgaacggggctcgaagggtccttgtagccgggaatggggggatcacagaccatttctttctttcggccaggctgaggccctgacgtggatgggcaaactgcaggcc

SEQ ID NO: 3511 - RNA, 120 nt, synthetic construct
  source 1..120: mol_type = other RNA
gggaggggccgggtccgcggccggcgaacggggctcgaagggtccttgtagccgggaatggggggatcacagaccatttctttctttcggccaggctgaggccctgacgtggatgggcaa

SEQ ID NO: 3512 - RNA, 100 nt, synthetic construct
  source 1..100: mol_type = other RNA
gggtccgcggccggcgaacggggctcgaagggtccttgtagccgggaatggggggatcacagaccatttctttctttcggccaggctgaggccctgacgt

SEQ ID NO: 3513 - RNA, 80 nt, synthetic construct
  source 1..80: mol_type = other RNA
ccggcgaacggggctcgaagggtccttgtagccgggaatggggggatcacagaccatttctttctttcggccaggctgag

SEQ ID NO: 3514 - RNA, 60 nt, synthetic construct
  source 1..60: mol_type = other RNA
gggctcgaagggtccttgtagccgggaatggggggatcacagaccatttctttctttcgg

SEQ ID NO: 3515 - RNA, 40 nt, synthetic construct
  source 1..40: mol_type = other RNA
ggtccttgtagccgggaatggggggatcacagaccatttc

SEQ ID NO: 3516 - RNA, 20 nt, synthetic construct
  source 1..20: mol_type = other RNA
gccgggaatggggggatcac

SEQ ID NO: 3517 - RNA, 10 nt, synthetic construct
  source 1..10: mol_type = other RNA
gccgggaatg

SEQ ID NO: 3518 - RNA, 20 nt, synthetic construct
  source 1..20: mol_type = other RNA
ggtccttgtagccgggaatg

SEQ ID NO: 3519 - RNA, 100 nt, synthetic construct
  source 1..100: mol_type = other RNA
ccagtcctgtgatccgggcccgccccctagcggccggggagggaggggccgggtccgcggccggcgaacggggctcgaagggtccttgtagccgggaatg

SEQ ID NO: 3520 - RNA, 90 nt, synthetic construct
  source 1..90: mol_type = other RNA
gatccgggcccgccccctagcggccggggagggaggggccgggtccgcggccggcgaacggggctcgaagggtccttgtagccgggaatg

SEQ ID NO: 3521 - RNA, 80 nt, synthetic construct
  source 1..80: mol_type = other RNA
cgccccctagcggccggggagggaggggccgggtccgcggccggcgaacggggctcgaagggtccttgtagccgggaatg

SEQ ID NO: 3522 - RNA, 70 nt, synthetic construct
  source 1..70: mol_type = other RNA
cggccggggagggaggggccgggtccgcggccggcgaacggggctcgaagggtccttgtagccgggaatg

SEQ ID NO: 3523 - RNA, 60 nt, synthetic construct
  source 1..60: mol_type = other RNA
gggaggggccgggtccgcggccggcgaacggggctcgaagggtccttgtagccgggaatg

SEQ ID NO: 3524 - RNA, 50 nt, synthetic construct
  source 1..50: mol_type = other RNA
gggtccgcggccggcgaacggggctcgaagggtccttgtagccgggaatg

SEQ ID NO: 3525 - RNA, 40 nt, synthetic construct
  source 1..40: mol_type = other RNA
ccggcgaacggggctcgaagggtccttgtagccgggaatg

SEQ ID NO: 3526 - RNA, 30 nt, synthetic construct
  source 1..30: mol_type = other RNA
gggctcgaagggtccttgtagccgggaatg

SEQ ID NO: 3527 - RNA, 100 nt, synthetic construct
  source 1..100: mol_type = other RNA
gggggatcacagaccatttctttctttcggccaggctgaggccctgacgtggatgggcaaactgcaggcctgggaaggcagcaagccgggccgtccgtgt

SEQ ID NO: 3528 - RNA, 90 nt, synthetic construct
  source 1..90: mol_type = other RNA
gggggatcacagaccatttctttctttcggccaggctgaggccctgacgtggatgggcaaactgcaggcctgggaaggcagcaagccggg

SEQ ID NO: 3529 - RNA, 80 nt, synthetic construct
  source 1..80: mol_type = other RNA
gggggatcacagaccatttctttctttcggccaggctgaggccctgacgtggatgggcaaactgcaggcctgggaaggca

SEQ ID NO: 3530 - RNA, 70 nt, synthetic construct
  source 1..70: mol_type = other RNA
gggggatcacagaccatttctttctttcggccaggctgaggccctgacgtggatgggcaaactgcaggcc

SEQ ID NO: 3531 - RNA, 60 nt, synthetic construct
  source 1..60: mol_type = other RNA
gggggatcacagaccatttctttctttcggccaggctgaggccctgacgtggatgggcaa

SEQ ID NO: 3532 - RNA, 50 nt, synthetic construct
  source 1..50: mol_type = other RNA
gggggatcacagaccatttctttctttcggccaggctgaggccctgacgt

SEQ ID NO: 3533 - RNA, 75 nt, synthetic construct
  source 1..75: mol_type = other RNA
gggggatcacagaccatttctttgccgggaatgctgctgctgctgctggggggatcacctttcggccaggctgag

SEQ ID NO: 3534 - RNA, 30 nt, synthetic construct
  source 1..30: mol_type = other RNA
gggggatcacagaccatttctttctttcgg

SEQ ID NO: 3535 - RNA, 20 nt, synthetic construct
  source 1..20: mol_type = other RNA
gggggatcacagaccatttc

SEQ ID NO: 3536 - RNA, 10 nt, synthetic construct
  source 1..10: mol_type = other RNA
gggggatcac

SEQ ID NO: 3537 - RNA, 215 nt, synthetic construct
  source 1..215: mol_type = other RNA
acacggacggcccggcttgctgccttcccaggcctgcagtttgcccatccacgtcagggcctcagcctggccgaaagaaagaaatggtctgtgatccccccagcagcagcagcagcattcccggctacaaggacccttcgagccccgttcgccggccgcggacccggcccctccctccccggccgctagggggcgggcccggatcacaggactgg

SEQ ID NO: 3538 - RNA, 195 nt, synthetic construct
  source 1..195: mol_type = other RNA
cccggcttgctgccttcccaggcctgcagtttgcccatccacgtcagggcctcagcctggccgaaagaaagaaatggtctgtgatccccccagcagcagcagcagcattcccggctacaaggacccttcgagccccgttcgccggccgcggacccggcccctccctccccggccgctagggggcgggcccggatc

SEQ ID NO: 3539 - RNA, 175 nt, synthetic construct
  source 1..175: mol_type = other RNA
tgccttcccaggcctgcagtttgcccatccacgtcagggcctcagcctggccgaaagaaagaaatggtctgtgatccccccagcagcagcagcagcattcccggctacaaggacccttcgagccccgttcgccggccgcggacccggcccctccctccccggccgctagggggcg

SEQ ID NO: 3540 - RNA, 155 nt, synthetic construct
  source 1..155: mol_type = other RNA
ggcctgcagtttgcccatccacgtcagggcctcagcctggccgaaagaaagaaatggtctgtgatccccccagcagcagcagcagcattcccggctacaaggacccttcgagccccgttcgccggccgcggacccggcccctccctccccggccg

SEQ ID NO: 3541 - RNA, 135 nt, synthetic construct
  source 1..135: mol_type = other RNA
ttgcccatccacgtcagggcctcagcctggccgaaagaaagaaatggtctgtgatccccccagcagcagcagcagcattcccggctacaaggacccttcgagccccgttcgccggccgcggacccggcccctccc

SEQ ID NO: 3542 - RNA, 115 nt, synthetic construct
  source 1..115: mol_type = other RNA
acgtcagggcctcagcctggccgaaagaaagaaatggtctgtgatccccccagcagcagcagcagcattcccggctacaaggacccttcgagccccgttcgccggccgcggaccc

SEQ ID NO: 3543 - RNA, 95 nt, synthetic construct
  source 1..95: mol_type = other RNA
ctcagcctggccgaaagaaagaaatggtctgtgatccccccagcagcagcagcagcattcccggctacaaggacccttcgagccccgttcgccgg

SEQ ID NO: 3544 - RNA, 75 nt, synthetic construct
  source 1..75: mol_type = other RNA
ccgaaagaaagaaatggtctgtgatccccccagcagcagcagcagcattcccggctacaaggacccttcgagccc

SEQ ID NO: 3545 - RNA, 55 nt, synthetic construct
  source 1..55: mol_type = other RNA
gaaatggtctgtgatccccccagcagcagcagcagcattcccggctacaaggacc

SEQ ID NO: 3546 - RNA, 35 nt, synthetic construct
  source 1..35: mol_type = other RNA
gtgatccccccagcagcagcagcagcattcccggc

SEQ ID NO: 3547 - RNA, 200 nt, synthetic construct
  source 1..200: mol_type = other RNA
acacggacggcccggcttgctgccttcccaggcctgcagtttgcccatccacgtcagggcctcagcctggccgaaagaaagaaatggtctgtgatccccccattcccggctacaaggacccttcgagccccgttcgccggccgcggacccggcccctccctccccggccgctagggggcgggcccggatcacaggactgg

SEQ ID NO: 3548 - RNA, 180 nt, synthetic construct
  source 1..180: mol_type = other RNA
cccggcttgctgccttcccaggcctgcagtttgcccatccacgtcagggcctcagcctggccgaaagaaagaaatggtctgtgatccccccattcccggctacaaggacccttcgagccccgttcgccggccgcggacccggcccctccctccccggccgctagggggcgggcccggatc

SEQ ID NO: 3549 - RNA, 160 nt, synthetic construct
  source 1..160: mol_type = other RNA
tgccttcccaggcctgcagtttgcccatccacgtcagggcctcagcctggccgaaagaaagaaatggtctgtgatccccccattcccggctacaaggacccttcgagccccgttcgccggccgcggacccggcccctccctccccggccgctagggggcg

SEQ ID NO: 3550 - RNA, 140 nt, synthetic construct
  source 1..140: mol_type = other RNA
ggcctgcagtttgcccatccacgtcagggcctcagcctggccgaaagaaagaaatggtctgtgatccccccattcccggctacaaggacccttcgagccccgttcgccggccgcggacccggcccctccctccccggccg

SEQ ID NO: 3551 - RNA, 120 nt, synthetic construct
  source 1..120: mol_type = other RNA
ttgcccatccacgtcagggcctcagcctggccgaaagaaagaaatggtctgtgatccccccattcccggctacaaggacccttcgagccccgttcgccggccgcggacccggcccctccc

SEQ ID NO: 3552 - RNA, 100 nt, synthetic construct
  source 1..100: mol_type = other RNA
acgtcagggcctcagcctggccgaaagaaagaaatggtctgtgatccccccattcccggctacaaggacccttcgagccccgttcgccggccgcggaccc

SEQ ID NO: 3553 - RNA, 80 nt, synthetic construct
  source 1..80: mol_type = other RNA
ctcagcctggccgaaagaaagaaatggtctgtgatccccccattcccggctacaaggacccttcgagccccgttcgccgg

SEQ ID NO: 3554 - RNA, 60 nt, synthetic construct
  source 1..60: mol_type = other RNA
ccgaaagaaagaaatggtctgtgatccccccattcccggctacaaggacccttcgagccc

SEQ ID NO: 3555 - RNA, 40 nt, synthetic construct
  source 1..40: mol_type = other RNA
gaaatggtctgtgatccccccattcccggctacaaggacc

SEQ ID NO: 3556 - RNA, 20 nt, synthetic construct
  source 1..20: mol_type = other RNA
gtgatccccccattcccggc

SEQ ID NO: 3557 - RNA, 100 nt, synthetic construct
  source 1..100: mol_type = other RNA
acacggacggcccggcttgctgccttcccaggcctgcagtttgcccatccacgtcagggcctcagcctggccgaaagaaagaaatggtctgtgatccccc

SEQ ID NO: 3558 - RNA, 90 nt, synthetic construct
  source 1..90: mol_type = other RNA
cccggcttgctgccttcccaggcctgcagtttgcccatccacgtcagggcctcagcctggccgaaagaaagaaatggtctgtgatccccc

SEQ ID NO: 3559 - RNA, 80 nt, synthetic construct
  source 1..80: mol_type = other RNA
tgccttcccaggcctgcagtttgcccatccacgtcagggcctcagcctggccgaaagaaagaaatggtctgtgatccccc

SEQ ID NO: 3560 - RNA, 70 nt, synthetic construct
  source 1..70: mol_type = other RNA
ggcctgcagtttgcccatccacgtcagggcctcagcctggccgaaagaaagaaatggtctgtgatccccc

SEQ ID NO: 3561 - RNA, 60 nt, synthetic construct
  source 1..60: mol_type = other RNA
ttgcccatccacgtcagggcctcagcctggccgaaagaaagaaatggtctgtgatccccc

SEQ ID NO: 3562 - RNA, 50 nt, synthetic construct
  source 1..50: mol_type = other RNA
acgtcagggcctcagcctggccgaaagaaagaaatggtctgtgatccccc

SEQ ID NO: 3563 - RNA, 40 nt, synthetic construct
  source 1..40: mol_type = other RNA
ctcagcctggccgaaagaaagaaatggtctgtgatccccc

SEQ ID NO: 3564 - RNA, 30 nt, synthetic construct
  source 1..30: mol_type = other RNA
ccgaaagaaagaaatggtctgtgatccccc

SEQ ID NO: 3565 - RNA, 20 nt, synthetic construct
  source 1..20: mol_type = other RNA
gaaatggtctgtgatccccc

SEQ ID NO: 3566 - RNA, 10 nt, synthetic construct
  source 1..10: mol_type = other RNA
gtgatccccc

SEQ ID NO: 3567 - RNA, 100 nt, synthetic construct
  source 1..100: mol_type = other RNA
cattcccggctacaaggacccttcgagccccgttcgccggccgcggacccggcccctccctccccggccgctagggggcgggcccggatcacaggactgg

SEQ ID NO: 3568 - RNA, 90 nt, synthetic construct
  source 1..90: mol_type = other RNA
cattcccggctacaaggacccttcgagccccgttcgccggccgcggacccggcccctccctccccggccgctagggggcgggcccggatc

SEQ ID NO: 3569 - RNA, 80 nt, synthetic construct
  source 1..80: mol_type = other RNA
cattcccggctacaaggacccttcgagccccgttcgccggccgcggacccggcccctccctccccggccgctagggggcg

SEQ ID NO: 3570 - RNA, 70 nt, synthetic construct
  source 1..70: mol_type = other RNA
cattcccggctacaaggacccttcgagccccgttcgccggccgcggacccggcccctccctccccggccg

SEQ ID NO: 3571 - RNA, 60 nt, synthetic construct
  source 1..60: mol_type = other RNA
cattcccggctacaaggacccttcgagccccgttcgccggccgcggacccggcccctccc

SEQ ID NO: 3572 - RNA, 50 nt, synthetic construct
  source 1..50: mol_type = other RNA
cattcccggctacaaggacccttcgagccccgttcgccggccgcggaccc

SEQ ID NO: 3573 - RNA, 40 nt, synthetic construct
  source 1..40: mol_type = other RNA
cattcccggctacaaggacccttcgagccccgttcgccgg

SEQ ID NO: 3574 - RNA, 30 nt, synthetic construct
  source 1..30: mol_type = other RNA
cattcccggctacaaggacccttcgagccc

SEQ ID NO: 3575 - RNA, 20 nt, synthetic construct
  source 1..20: mol_type = other RNA
cattcccggctacaaggacc

SEQ ID NO: 3576 - RNA, 13 nt, synthetic construct
  source 1..13: mol_type = other RNA
cagcattcccggc

SEQ ID NO: 3577 - protein, 677 aa, Moloney murine leukemia virus
TLNIEDEHRLHETSKEPDVSLGSTWLSDFPQAWAETGGMGLAVRQAPLIIPLKATSTPVSIKQYPMSQEARLGIKPHIQRLLDQGILVPCQSPWNTPLLPVKKPGTNDYRPVQDLREVNKRVEDIHPTVPNPYNLLSGLPPSHQWYTVLDLKDAFFCLRLHPTSQPLFAFEWRDPEMGISGQLTWTRLPQGFKNSPTLFDEALHRDLADFRIQHPDLILLQYVDDLLLAATSELDCQQGTRALLQTLGNLGYRASAKKAQICQKQVKYLGYLLKEGQRWLTEARKETVMGQPTPKTPRQLREFLGTAGFCRLWIPGFAEMAAPLYPLTKTGTLFNWGPDQQKAYQEIKQALLTAPALGLPDLTKPFELFVDEKQGYAKGVLTQKLGPWRRPVAYLSKKLDPVAAGWPPCLRMVAAIAVLTKDAGKLTMGQPLVILAPHAVEALVKQPPDRWLSNARMTHYQALLLDTDRVQFGPVVALNPATLLPLPEEGLQHNCLDILAEAHGTRPDLTDQPLPDADHTWYTDGSSLLQEGQRKAGAAVTTETEVIWAKALPAGTSAQRAELIALTQALKMAEGKKLNVYTDSRYAFATAHIHGEIYRRRGLLTSEGKEIKNKDEILALLKALFLPKRLSIIHCPGHQKGHSAEARGNRMADQAARKAAITETPDTSTLLIENSSP

SEQ ID NO: 3578 - protein, 677 aa, Moloney murine leukemia virus
TLNIEDEYRLHETSKEPDVSLGSTWLSDFPQAWAETGGMGLAVRQAPLIIPLKATSTPVSIKQYPMSQEARLGIKPHIQRLLDQGILVPCQSPWNTPLLPVKKPGTNDYRPVQDLREVNKRVEDIHPTVPNPYNLLSGLPPSHQWYTVLDLKDAFFCLRLHPTSQPLFAFEWRDPEMGISGQLTWTRLPQGFKNSPTLFDEALHRDLADFRIQHPDLILLQYVDDLLLAATSELDCQQGTRALLQTLGNLGYRASAKKAQICQKQVKYLGYLLKEGQRWLTEARKETVMGQPTPKTPRQLREFLGTAGFCRLWIPGFAEMAAPLYPLTKTGTLFNWGPDQQKAYQEIKQALLTAPALGLPDLTKPFELFVDEKQGYAKGVLTQKLGPWRRPVAYLSKKLDPVAAGWPPCLRMVAAIAVLTKDAGKLTMGQPLVILAPHAVEALVKQPPDRWLSNARMTHYQALLLDTDRVQFGPVVALNPATLLPLPEEGLQHNCLDILAEAHGTRPDLTDQPLPDADHTWYTDGSSLLQEGQRKAGAAVTTETEVIWAKALPAGTSAQRAELIALTQALKMAEGKKLNVYTDSRYAFATAHIHGEIYRRRGLLTSEGKEIKNKDEILALLKALFLPKRLSIIHCPGHQKGHSAEARGNRMADQAARKAAITETPDTSTLLIENSSP

SEQ ID NO: 3579 - protein, 677 aa, synthetic construct
TLNIEDEYRLHETSKEPDVSLGSTWLSDFPQAWAETGGMGLAVRQAPLIIPLKATSTPVSIKQYPMSQEARLGIKPHIQRLLDQGILVPCQSPWNTPLLPVKKPGTNDYRPVQDLREVNKRVEDIHPTVPNPYNLLSGLPPSHQWYTVLDLKDAFFCLRLHPTSQPLFAFEWRDPEMGISGQLTWTRLPQGFKNSPTLFNEALHRDLADFRIQHPDLILLQYVDDLLLAATSELDCQQGTRALLQTLGNLGYRASAKKAQICQKQVKYLGYLLKEGQRWLTEARKETVMGQPTPKTPRQLREFLGKAGFCRLFIPGFAEMAAPLYPLTKPGTLFNWGPDQQKAYQEIKQALLTAPALGLPDLTKPFELFVDEKQGYAKGVLTQKLGPWRRPVAYLSKKLDPVAAGWPPCLRMVAAIAVLTKDAGKLTMGQPLVILAPHAVEALVKQPPDRWLSNARMTHYQALLLDTDRVQFGPVVALNPATLLPLPEEGLQHNCLDILAEAHGTRPDLTDQPLPDADHTWYTDGSSLLQEGQRKAGAAVTTETEVIWAKALPAGTSAQRAELIALTQALKMAEGKKLNVYTDSRYAFATAHIHGEIYRRRGWLTSEGKEIKNKDEILALLKALFLPKRLSIIHCPGHQKGHSAEARGNRMADQAARKAAITETPDTSTLLIENSSP

SEQ ID NO: 3580 - protein, 1368 aa, Streptococcus pyogenes [sequence omitted]

SEQ ID NO: 3581 - protein, 1368 aa, synthetic construct
MDKKYSIGLDIGTNSVGWAVITDEYKVPSKKFKVLGNTDRHSIKKNLIGALLFDSGETAEATRLKRTARRRYTRRKNRICYLQEIFSNEMAKVDDSFFHRLEESFLVEEDKKHERHPIFGNIVDEVAYHEKYPTIYHLRKKLVDSTDKADLRLIYLALAHMIKFRGHFLIEGDLNPDNSDVDKLFIQLVQTYNQLFEENPINASGVDAKAILSARLSKSRRLENLIAQLPGEKKNGLFGNLIALSLGLTPNFKSNFDLAEDAKLQLSKDTYDDDLDNLLAQIGDQYADLFLAAKNLSDAILLSDILRVNTEITKAPLSASMIKRYDEHHQDLTLLKALVRQQLPEKYKEIFFDQSKNGYAGYIDGGASQEEFYKFIKPILEKMDGTEELLVKLNREDLLRKQRTFDNGSIPHQIHLGELHAILRRQEDFYPFLKDNREKIEKILTFRIPYYVGPLARGNSRFAWMTRKSEETITPWNFEEVVDKGASAQSFIERMTNFDKNLPNEKVLPKHSLLYEYFTVYNELTKVKYVTEGMRKPAFLSGEQKKAIVDLLFKTNRKVTVKQLKEDYFKKIECFDSVEISGVEDRFNASLGTYHDLLKIIKDKDFLDNEENEDILEDIVLTLTLFEDREMIEERLKTYAHLFDDKVMKQLKRRRYTGWGRLSRKLINGIRDKQSGKTILDFLKSDGFANRNFMQLIHDDSLTFKEDIQKAQVSGQGDSLHEHIANLAGSPAIKKGILQTVKVVDELVKVMGRHKPENIVIEMARENQTTQKGQKNSRERMKRIEEGIKELGSQILKEHPVENTQLQNEKLYLYYLQNGRDMYVDQELDINRLSDYDVDAIVPQSFLKDDSIDNKVLTRSDKNRGKSDNVPSEEVVKKMKNYWRQLLNAKLITQRKFDNLTKAERGGLSELDKAGFIKRQLVETRQITKHVAQILDSRMNTKYDENDKLIREVKVITLKSKLVSDFRKDFQFYKVREINNYHHAHDAYLNAVVGTALIKKYPKLESEFVYGDYKVYDVRKMIAKSEQEIGKATAKYFFYSNIMNFFKTEITLANGEIRKRPLIETNGETGEIVWDKGRDFATVRKVLSMPQVNIVKKTEVQTGGFSKESILPKRNSDKLIARKKDWDPKKYGGFDSPTVAYSVLVVAKVEKGKSKKLKSVKELLGITIMERSSFEKNPIDFLEAKGYKEVKKDLIIKLPKYSLFELENGRKRMLASAGELQKGNELALPSKYVNFLYLASHYEKLKGSPEDNEQKQLFVEQHKHYLDEIIEQISEFSKRVILADANLDKVLSAYNKHRDKPIREQAENIIHLFTLTNLGAPAAFKYFDTTIDRKRYTSTKEVLDATLIHQSITGLYETRIDLSQLGGD

SEQ ID NO: 3582 - protein, 1367 aa, synthetic construct
DKKYSIGLDIGTNSVGWAVITDEYKVPSKKFKVLGNTDRHSIKKNLIGALLFDSGETAEATRLKRTARRRYTRRKNRICYLQEIFSNEMAKVDDSFFHRLEESFLVEEDKKHERHPIFGNIVDEVAYHEKYPTIYHLRKKLVDSTDKADLRLIYLALAHMIKFRGHFLIEGDLNPDNSDVDKLFIQLVQTYNQLFEENPINASGVDAKAILSARLSKSRRLENLIAQLPGEKKNGLFGNLIALSLGLTPNFKSNFDLAEDAKLQLSKDTYDDDLDNLLAQIGDQYADLFLAAKNLSDAILLSDILRVNTEITKAPLSASMIKRYDEHHQDLTLLKALVRQQLPEKYKEIFFDQSKNGYAGYIDGGASQEEFYKFIKPILEKMDGTEELLVKLNREDLLRKQRTFDNGSIPHQIHLGELHAILRRQEDFYPFLKDNREKIEKILTFRIPYYVGPLARGNSRFAWMTRKSEETITPWNFEEVVDKGASAQSFIERMTNFDKNLPNEKVLPKHSLLYEYFTVYNELTKVKYVTEGMRKPAFLSGEQKKAIVDLLFKTNRKVTVKQLKEDYFKKIECFDSVEISGVEDRFNASLGTYHDLLKIIKDKDFLDNEENEDILEDIVLTLTLFEDREMIEERLKTYAHLFDDKVMKQLKRRRYTGWGRLSRKLINGIRDKQSGKTILDFLKSDGFANRNFMQLIHDDSLTFKEDIQKAQVSGQGDSLHEHIANLAGSPAIKKGILQTVKVVDELVKVMGRHKPENIVIEMARENQTTQKGQKNSRERMKRIEEGIKELGSQILKEHPVENTQLQNEKLYLYYLQNGRDMYVDQELDINRLSDYDVDAIVPQSFLKDDSIDNKVLTRSDKNRGKSDNVPSEEVVKKMKNYWRQLLNAKLITQRKFDNLTKAERGGLSELDKAGFIKRQLVETRQITKHVAQILDSRMNTKYDENDKLIREVKVITLKSKLVSDFRKDFQFYKVREINNYHHAHDAYLNAVVGTALIKKYPKLESEFVYGDYKVYDVRKMIAKSEQEIGKATAKYFFYSNIMNFFKTEITLANGEIRKRPLIETNGETGEIVWDKGRDFATVRKVLSMPQVNIVKKTEVQTGGFSKESILPKRNSDKLIARKKDWDPKKYGGFDSPTVAYSVLVVAKVEKGKSKKLKSVKELLGITIMERSSFEKNPIDFLEAKGYKEVKKDLIIKLPKYSLFELENGRKRMLASAGELQKGNELALPSKYVNFLYLASHYEKLKGSPEDNEQKQLFVEQHKHYLDEIIEQISEFSKRVILADANLDKVLSAYNKHRDKPIREQAENIIHLFTLTNLGAPAAFKYFDTTIDRKRYTSTKEVLDATLIHQSITGLYETRIDLSQLGGD

SEQ ID NO: 3583 - protein, 1054 aa, Staphylococcus lugdunensis
MNQKFILGLDIGITSVGYGLIDYETKNIIDAGVRLFPEANVENNEGRRSKRGSRRLKRRRIHRLERVKKLLEDYNLLDQSQIPQSTNPYAIRVKGLSEALSKDELVIALLHIAKRRGIHKIDVIDSNDDVGNELSTKEQLNKNSKLLKDKFVCQIQLERMNEGQVRGEKNRFKTADIIKEIIQLLNVQKNFHQLDENFINKYIELVEMRREYFEGPGKGSPYGWEGDPKAWYETLMGHCTYFPDELRSVKYAYSADLFNALNDLNNLVIQRDGLSKLEYHEKYHIIENVFKQKKKPTLKQIANEINVNPEDIKGYRITKSGKPQFTEFKLYHDLKSVLFDQSILENEDVLDQIAEILTIYQDKDSIKSKLTELDILLNEEDKENIAQLTGYTGTHRLSLKCIRLVLEEQWYSSRNQMEIFTHLNIKPKKINLTAANKIPKAMIDEFILSPVVKRTFGQAINLINKIIEKYGVPEDIIIELARENNSKDKQKFINEMQKKNENTRKRINEIIGKYGNQNAKRLVEKIRLHDEQEGKCLYSLESIPLEDLLNNPNHYEVDHIIPRSVSFDNSYHNKVLVKQSENSKKSNLTPYQYFNSGKSKLSYNQFKQHILNLSKSQDRISKKKKEYLLEERDINKFEVQKEFINRNLVDTRYATRELTNYLKAYFSANNMNVKVKTINGSFTDYLRKVWKFKKERNHGYKHHAEDALIIANADFLFKENKKLKAVNSVLEKPEIESKQLDIQVDSEDNYSEMFIIPKQVQDIKDFRNFKYSHRVDKKPNRQLINDTLYSTRKKDNSTYIVQTIKDIYAKDNTTLKKQFDKSPEKFLMYQHDPRTFEKLEVIMKQYANEKNPLAKYHEETGEYLTKYSKKNNGPIVKSLKYIGNKLGSHLDVTHQFKSSTKKLVKLSIKPYRFDVYLTDKGYKFITISYLDVLKKDNYYYIPEQKYDKLKLGKAIDKNAKFIASFYKNDLIKLDGEIYKIIGVNSDTRNMIELDLPDIRYKEYCELNNIKGEPRIKKTIGKKVNSIEKLTTDVLGNVFTNTQYTKPQLLFKRGN

SEQ ID NO: 3584 - protein, 1054 aa, synthetic construct
MNQKFILGLDIGITSVGYGLIDYETKNIIDAGVRLFPEANVENNEGRRSKRGSRRLKRRRIHRLERVKKLLEDYNLLDQSQIPQSTNPYAIRVKGLSEALSKDELVIALLHIAKRRGIHKIDVIDSNDDVGNELSTKEQLNKNSKLLKDKFVCQIQLERMNEGQVRGEKNRFKTADIIKEIIQLLNVQKNFHQLDENFINKYIELVEMRREYFEGPGKGSPYGWEGDPKAWYETLMGHCTYFPDELRSVKYAYSADLFNALNDLNNLVIQRDGLSKLEYHEKYHIIENVFKQKKKPTLKQIANEINVNPEDIKGYRITKSGKPQFTEFKLYHDLKSVLFDQSILENEDVLDQIAEILTIYQDKDSIKSKLTELDILLNEEDKENIAQLTGYTGTHRLSLKCIRLVLEEQWYSSRNQMEIFTHLNIKPKKINLTAANKIPKAMIDEFILSPVVKRTFGQAINLINKIIEKYGVPEDIIIELARENNSKDKQKFINEMQKKNENTRKRINEIIGKYGNQNAKRLVEKIRLHDEQEGKCLYSLESIPLEDLLNNPNHYEVDHIIPRSVSFDNSYHNKVLVKQSEASKKSNLTPYQYFNSGKSKLSYNQFKQHILNLSKSQDRISKKKKEYLLEERDINKFEVQKEFINRNLVDTRYATRELTNYLKAYFSANNMNVKVKTINGSFTDYLRKVWKFKKERNHGYKHHAEDALIIANADFLFKENKKLKAVNSVLEKPEIESKQLDIQVDSEDNYSEMFIIPKQVQDIKDFRNFKYSHRVDKKPNRQLINDTLYSTRKKDNSTYIVQTIKDIYAKDNTTLKKQFDKSPEKFLMYQHDPRTFEKLEVIMKQYANEKNPLAKYHEETGEYLTKYSKKNNGPIVKSLKYIGNKLGSHLDVTHQFKSSTKKLVKLSIKPYRFDVYLTDKGYKFITISYLDVLKKDNYYYIPEQKYDKLKLGKAIDKNAKFIASFYKNDLIKLDGEIYKIIGVNSDTRNMIELDLPDIRYKEYCELNNIKGEPRIKKTIGKKVNSIEKLTTDVLGNVFTNTQYTKPQLLFKRGN

SEQ ID NO: 3585 - protein, 1053 aa, synthetic construct
NQKFILGLDIGITSVGYGLIDYETKNIIDAGVRLFPEANVENNEGRRSKRGSRRLKRRRIHRLERVKKLLEDYNLLDQSQIPQSTNPYAIRVKGLSEALSKDELVIALLHIAKRRGIHKIDVIDSNDDVGNELSTKEQLNKNSKLLKDKFVCQIQLERMNEGQVRGEKNRFKTADIIKEIIQLLNVQKNFHQLDENFINKYIELVEMRREYFEGPGKGSPYGWEGDPKAWYETLMGHCTYFPDELRSVKYAYSADLFNALNDLNNLVIQRDGLSKLEYHEKYHIIENVFKQKKKPTLKQIANEINVNPEDIKGYRITKSGKPQFTEFKLYHDLKSVLFDQSILENEDVLDQIAEILTIYQDKDSIKSKLTELDILLNEEDKENIAQLTGYTGTHRLSLKCIRLVLEEQWYSSRNQMEIFTHLNIKPKKINLTAANKIPKAMIDEFILSPVVKRTFGQAINLINKIIEKYGVPEDIIIELARENNSKDKQKFINEMQKKNENTRKRINEIIGKYGNQNAKRLVEKIRLHDEQEGKCLYSLESIPLEDLLNNPNHYEVDHIIPRSVSFDNSYHNKVLVKQSEASKKSNLTPYQYFNSGKSKLSYNQFKQHILNLSKSQDRISKKKKEYLLEERDINKFEVQKEFINRNLVDTRYATRELTNYLKAYFSANNMNVKVKTINGSFTDYLRKVWKFKKERNHGYKHHAEDALIIANADFLFKENKKLKAVNSVLEKPEIESKQLDIQVDSEDNYSEMFIIPKQVQDIKDFRNFKYSHRVDKKPNRQLINDTLYSTRKKDNSTYIVQTIKDIYAKDNTTLKKQFDKSPEKFLMYQHDPRTFEKLEVIMKQYANEKNPLAKYHEETGEYLTKYSKKNNGPIVKSLKYIGNKLGSHLDVTHQFKSSTKKLVKLSIKPYRFDVYLTDKGYKFITISYLDVLKKDNYYYIPEQKYDKLKLGKAIDKNAKFIASFYKNDLIKLDGEIYKIIGVNSDTRNMIELDLPDIRYKEYCELNNIKGEPRIKKTIGKKVNSIEKLTTDVLGNVFTNTQYTKPQLLFKRGN

SEQ ID NO: 3586 - protein, 1053 aa, Staphylococcus aureus; identical to SEQ ID NO: 3585

SEQ ID NO: 3587 - skipped

SEQ ID NO: 3588 - protein, 1053 aa, synthetic construct
MKRNYILGLDIGITSVGYGIIDYETRDVIDAGVRLFKEANVENNEGRRSKRGARRLKRRRRHRIQRVKKLLFDYNLLTDHSELSGINPYEARVKGLSQKLSEEEFSAALLHLAKRRGVHNVNEVEEDTGNELSTKEQISRNSKALEEKYVAELQLERLKKDGEVRGSINRFKTSDYVKEAKQLLKVQKAYHQLDQSFIDTYIDLLETRRTYYEGPGEGSPFGWKDIKEWYEMLMGHCTYFPEELRSVKYAYNADLYNALNDLNNLVITRDENEKLEYYEKFQIIENVFKQKKKPTLKQIAKEILVNEEDIKGYRVTSTGKPEFTNLKVYHDIKDITARKEIIENAELLDQIAKILTIYQSSEDIQEELTNLNSELTQEEIEQISNLKGYTGTHNLSLKAINLILDELWHTNDNQIAIFNRLKLVPKKVDLSQQKEIPTTLVDDFILSPVVKRSFIQSIKVINAIIKKYGLPNDIIIELAREKNSKDAQKMINEMQKRNRQTNERIEEIIRTTGKENAKYLIEKIKLHDMQEGKCLYSLEAIPLEDLLNNPFNYEVDHIIPRSVSFDNSFNNKVLVKQEEASKKGNRTPFQYLSSSDSKISYETFKKHILNLAKGKGRISKTKKEYLLEERDINRFSVQKDFINRNLVDTRYATRGLMNLLRSYFRVNNLDVKVKSINGGFTSFLRRKWKFKKERNKGYKHHAEDALIIANADFIFKEWKKLDKAKKVMENQMFEEKQAESMPEIETEQEYKEIFITPHQIKHIKDFKDYKYSHRVDKKPNRELINDTLYSTRKDDKGNTLIVNNLNGLYDKDNDKLKKLINKSPEKLLMYHHDPQTYQKLKLIMEQYGDEKNPLYKYYEETGNYLTKYSKKDNGPVIKKIKYYGNKLNAHLDITDDYPNSRNKVVKLSLKPYRFDVYLDNGVYKFVTVKNLDVIKKENYYEVNSKCYEEAKKLKKISNQAEFIASFYNNDLIKINGELYRVIGVNNDLLNRIEVNMIDITYREYLENMNDKRPPRIIKTIASKTQSIKKYSTDILGNLYEVKSKKHPQIIKKG

SEQ ID NO: 3589 - protein, 1052 aa, synthetic construct
KRNYILGLDIGITSVGYGIIDYETRDVIDAGVRLFKEANVENNEGRRSKRGARRLKRRRRHRIQRVKKLLFDYNLLTDHSELSGINPYEARVKGLSQKLSEEEFSAALLHLAKRRGVHNVNEVEEDTGNELSTKEQISRNSKALEEKYVAELQLERLKKDGEVRGSINRFKTSDYVKEAKQLLKVQKAYHQLDQSFIDTYIDLLETRRTYYEGPGEGSPFGWKDIKEWYEMLMGHCTYFPEELRSVKYAYNADLYNALNDLNNLVITRDENEKLEYYEKFQIIENVFKQKKKPTLKQIAKEILVNEEDIKGYRVTSTGKPEFTNLKVYHDIKDITARKEIIENAELLDQIAKILTIYQSSEDIQEELTNLNSELTQEEIEQISNLKGYTGTHNLSLKAINLILDELWHTNDNQIAIFNRLKLVPKKVDLSQQKEIPTTLVDDFILSPVVKRSFIQSIKVINAIIKKYGLPNDIIIELAREKNSKDAQKMINEMQKRNRQTNERIEEIIRTTGKENAKYLIEKIKLHDMQEGKCLYSLEAIPLEDLLNNPFNYEVDHIIPRSVSFDNSFNNKVLVKQEEASKKGNRTPFQYLSSSDSKISYETFKKHILNLAKGKGRISKTKKEYLLEERDINRFSVQKDFINRNLVDTRYATRGLMNLLRSYFRVNNLDVKVKSINGGFTSFLRRKWKFKKERNKGYKHHAEDALIIANADFIFKEWKKLDKAKKVMENQMFEEKQAESMPEIETEQEYKEIFITPHQIKHIKDFKDYKYSHRVDKKPNRELINDTLYSTRKDDKGNTLIVNNLNGLYDKDNDKLKKLINKSPEKLLMYHHDPQTYQKLKLIMEQYGDEKNPLYKYYEETGNYLTKYSKKDNGPVIKKIKYYGNKLNAHLDITDDYPNSRNKVVKLSLKPYRFDVYLDNGVYKFVTVKNLDVIKKENYYEVNSKCYEEAKKLKKISNQAEFIASFYNNDLIKINGELYRVIGVNNDLLNRIEVNMIDITYREYLENMNDKRPPRIIKTIASKTQSIKKYSTDILGNLYEVKSKKHPQIIKKG

SEQ ID NO: 3590 - protein, 1368 aa, synthetic construct
MDKKYSIGLDIGTNSVGWAVITDEYKVPSKKFKVLGNTDRHSIKKNLIGALLFDSGETAEATRLKRTARRRYTRRKNRICYLQEIFSNEMAKVDDSFFHRLEESFLVEEDKKHERHPIFGNIVDEVAYHEKYPTIYHLRKKLVDSTDKADLRLIYLALAHMIKFRGHFLIEGDLNPDNSDVDKLFIQLVQTYNQLFEENPINASGVDAKAILSARLSKSRRLENLIAQLPGEKKNGLFGNLIALSLGLTPNFKSNFDLAEDAKLQLSKDTYDDDLDNLLAQIGDQYADLFLAAKNLSDAILLSDILRVNTEITKAPLSASMIKRYDEHHQDLTLLKALVRQQLPEKYKEIFFDQSKNGYAGYIDGGASQEEFYKFIKPILEKMDGTEELLVKLNREDLLRKQRTFDNGSIPHQIHLGELHAILRRQEDFYPFLKDNREKIEKILTFRIPYYVGPLARGNSRFAWMTRKSEETITPWNFEEVVDKGASAQSFIERMTNFDKNLPNEKVLPKHSLLYEYFTVYNELTKVKYVTEGMRKPAFLSGEQKKAIVDLLFKTNRKVTVKQLKEDYFKKIECFDSVEISGVEDRFNASLGTYHDLLKIIKDKDFLDNEENEDILEDIVLTLTLFEDREMIEERLKTYAHLFDDKVMKQLKRRRYTGWGRLSRKLINGIRDKQSGKTILDFLKSDGFANRNFMQLIHDDSLTFKEDIQKAQVSGQGDSLHEHIANLAGSPAIKKGILQTVKVVDELVKVMGRHKPENIVIEMARENQTTQKGQKNSRERMKRIEEGIKELGSQILKEHPVENTQLQNEKLYLYYLQNGRDMYVDQELDINRLSDYDVDHIVPQSFLKDDSIDNKVLTRSDKNRGKSDNVPSEEVVKKMKNYWRQLLNAKLITQRKFDNLTKAERGGLSELDKAGFIKRQLVETRQITKHVAQILDSRMNTKYDENDKLIREVKVITLKSKLVSDFRKDFQFYKVREINNYHHAHDAYLNAVVGTALIKKYPKLESEFVYGDYKVYDVRKMIAKSEQEIGKATAKYFFYSNIMNFFKTEITLANGEIRKRPLIETNGETGEIVWDKGRDFATVRKVLSMPQVNIVKKTEVQTGGFSKESIRPKRNSDKLIARKKDWDPKKYGGFVSPTVAYSVLVVAKVEKGKSKKLKSVKELLGITIMERSSFEKNPIDFLEAKGYKEVKKDLIIKLPKYSLFELENGRKRMLASARFLQKGNELALPSKYVNFLYLASHYEKLKGSPEDNEQKQLFVEQHKHYLDEIIEQISEFSKRVILADANLDKVLSAYNKHRDKPIREQAENIIHLFTLTNLGAPRAFKYFDTTIDRKVYRSTKEVLDATLIHQSITGLYETRIDLSQLGGD

SEQ ID NO: 3591 - protein, 1368 aa, synthetic construct
MDKKYSIGLDIGTNSVGWAVITDEYKVPSKKFKVLGNTDRHSIKKNLIGALLFDSGETAEATRLKRTARRRYTRRKNRICYLQEIFSNEMAKVDDSFFHRLEESFLVEEDKKHERHPIFGNIVDEVAYHEKYPTIYHLRKKLVDSTDKADLRLIYLALAHMIKFRGHFLIEGDLNPDNSDVDKLFIQLVQTYNQLFEENPINASGVDAKAILSARLSKSRRLENLIAQLPGEKKNGLFGNLIALSLGLTPNFKSNFDLAEDAKLQLSKDTYDDDLDNLLAQIGDQYADLFLAAKNLSDAILLSDILRVNTEITKAPLSASMIKRYDEHHQDLTLLKALVRQQLPEKYKEIFFDQSKNGYAGYIDGGASQEEFYKFIKPILEKMDGTEELLVKLNREDLLRKQRTFDNGSIPHQIHLGELHAILRRQEDFYPFLKDNREKIEKILTFRIPYYVGPLARGNSRFAWMTRKSEETITPWNFEEVVDKGASAQSFIERMTNFDKNLPNEKVLPKHSLLYEYFTVYNELTKVKYVTEGMRKPAFLSGEQKKAIVDLLFKTNRKVTVKQLKEDYFKKIECFDSVEISGVEDRFNASLGTYHDLLKIIKDKDFLDNEENEDILEDIVLTLTLFEDREMIEERLKTYAHLFDDKVMKQLKRRRYTGWGRLSRKLINGIRDKQSGKTILDFLKSDGFANRNFMQLIHDDSLTFKEDIQKAQVSGQGDSLHEHIANLAGSPAIKKGILQTVKVVDELVKVMGRHKPENIVIEMARENQTTQKGQKNSRERMKRIEEGIKELGSQILKEHPVENTQLQNEKLYLYYLQNGRDMYVDQELDINRLSDYDVDAIVPQSFLKDDSIDNKVLTRSDKNRGKSDNVPSEEVVKKMKNYWRQLLNAKLITQRKFDNLTKAERGGLSELDKAGFIKRQLVETRQITKHVAQILDSRMNTKYDENDKLIREVKVITLKSKLVSDFRKDFQFYKVREINNYHHAHDAYLNAVVGTALIKKYPKLESEFVYGDYKVYDVRKMIAKSEQEIGKATAKYFFYSNIMNFFKTEITLANGEIRKRPLIETNGETGEIVWDKGRDFATVRKVLSMPQVNIVKKTEVQTGGFSKESIRPKRNSDKLIARKKDWDPKKYGGFVSPTVAYSVLVVAKVEKGKSKKLKSVKELLGITIMERSSFEKNPIDFLEAKGYKEVKKDLIIKLPKYSLFELENGRKRMLASARFLQKGNELALPSKYVNFLYLASHYEKLKGSPEDNEQKQLFVEQHKHYLDEIIEQISEFSKRVILADANLDKVLSAYNKHRDKPIREQAENIIHLFTLTNLGAPRAFKYFDTTIDRKVYRSTKEVLDATLIHQSITGLYETRIDLSQLGGD

SEQ ID NO: 3592 - protein, 1367 aa, synthetic construct
DKKYSIGLDIGTNSVGWAVITDEYKVPSKKFKVLGNTDRHSIKKNLIGALLFDSGETAEATRLKRTARRRYTRRKNRICYLQEIFSNEMAKVDDSFFHRLEESFLVEEDKKHERHPIFGNIVDEVAYHEKYPTIYHLRKKLVDSTDKADLRLIYLALAHMIKFRGHFLIEGDLNPDNSDVDKLFIQLVQTYNQLFEENPINASGVDAKAILSARLSKSRRLENLIAQLPGEKKNGLFGNLIALSLGLTPNFKSNFDLAEDAKLQLSKDTYDDDLDNLLAQIGDQYADLFLAAKNLSDAILLSDILRVNTEITKAPLSASMIKRYDEHHQDLTLLKALVRQQLPEKYKEIFFDQSKNGYAGYIDGGASQEEFYKFIKPILEKMDGTEELLVKLNREDLLRKQRTFDNGSIPHQIHLGELHAILRRQEDFYPFLKDNREKIEKILTFRIPYYVGPLARGNSRFAWMTRKSEETITPWNFEEVVDKGASAQSFIERMTNFDKNLPNEKVLPKHSLLYEYFTVYNELTKVKYVTEGMRKPAFLSGEQKKAIVDLLFKTNRKVTVKQLKEDYFKKIECFDSVEISGVEDRFNASLGTYHDLLKIIKDKDFLDNEENEDILEDIVLTLTLFEDREMIEERLKTYAHLFDDKVMKQLKRRRYTGWGRLSRKLINGIRDKQSGKTILDFLKSDGFANRNFMQLIHDDSLTFKEDIQKAQVSGQGDSLHEHIANLAGSPAIKKGILQTVKVVDELVKVMGRHKPENIVIEMARENQTTQKGQKNSRERMKRIEEGIKELGSQILKEHPVENTQLQNEKLYLYYLQNGRDMYVDQELDINRLSDYDVDAIVPQSFLKDDSIDNKVLTRSDKNRGKSDNVPSEEVVKKMKNYWRQLLNAKLITQRKFDNLTKAERGGLSELDKAGFIKRQLVETRQITKHVAQILDSRMNTKYDENDKLIREVKVITLKSKLVSDFRKDFQFYKVREINNYHHAHDAYLNAVVGTALIKKYPKLESEFVYGDYKVYDVRKMIAKSEQEIGKATAKYFFYSNIMNFFKTEITLANGEIRKRPLIETNGETGEIVWDKGRDFATVRKVLSMPQVNIVKKTEVQTGGFSKESIRPKRNSDKLIARKKDWDPKKYGGFVSPTVAYSVLVVAKVEKGKSKKLKSVKELLGITIMERSSFEKNPIDFLEAKGYKEVKKDLIIKLPKYSLFELENGRKRMLASARFLQKGNELALPSKYVNFLYLASHYEKLKGSPEDNEQKQLFVEQHKHYLDEIIEQISEFSKRVILADANLDKVLSAYNKHRDKPIREQAENIIHLFTLTNLGAPRAFKYFDTTIDRKVYRSTKEVLDATLIHQSITGLYETRIDLSQLGGD

SEQ ID NO: 3593 - protein, 1368 aa, synthetic construct
MDKKYSIGLDIGTNSVGWAVITDEYKVPSKKFKVLGNTDRHSIKKNLIGALLFDSGETAEATRLKRTARRRYTRRKNRICYLQEIFSNEMAKVDDSFFHRLEESFLVEEDKKHERHPIFGNIVDEVAYHEKYPTIYHLRKKLVDSTDKADLRLIYLALAHMIKFRGHFLIEGDLNPDNSDVDKLFIQLVQTYNQLFEENPINASGVDAKAILSARLSKSRRLENLIAQLPGEKKNGLFGNLIALSLGLTPNFKSNFDLAEDAKLQLSKDTYDDDLDNLLAQIGDQYADLFLAAKNLSDAILLSDILRVNTEITKAPLSASMIKRYDEHHQDLTLLKALVRQQLPEKYKEIFFDQSKNGYAGYIDGGASQEEFYKFIKPILEKMDGTEELLVKLNREDLLRKQRTFDNGSIPHQIHLGELHAILRRQEDFYPFLKDNREKIEKILTFRIPYYVGPLARGNSRFAWMTRKSEETITPWNFEEVVDKGASAQSFIERMTNFDKNLPNEKVLPKHSLLYEYFTVYNELTKVKYVTEGMRKPAFLSGEQKKAIVDLLFKTNRKVTVKQLKEDYFKKIECFDSVEISGVEDRFNASLGTYHDLLKIIKDKDFLDNEENEDILEDIVLTLTLFEDREMIEERLKTYAHLFDDKVMKQLKRRRYTGWGRLSRKLINGIRDKQSGKTILDFLKSDGFANRNFMQLIHDDSLTFKEDIQKAQVSGQGDSLHEHIANLAGSPAIKKGILQTVKVVDELVKVMGRHKPENIVIEMARENQTTQKGQKNSRERMKRIEEGIKELGSQILKEHPVENTQLQNEKLYLYYLQNGRDMYVDQELDINRLSDYDVDHIVPQSFLKDDSIDNKVLTRSDKNRGKSDNVPSEEVVKKMKNYWRQLLNAKLITQRKFDNLTKAERGGLSELDKAGFIKRQLVETRQITKHVAQILDSRMNTKYDENDKLIREVKVITLKSKLVSDFRKDFQFYKVREINNYHHAHDAYLNAVVGTALIKKYPKLESEFVYGDYKVYDVRKMIAKSEQEIGKATAKYFFYSNIMNFFKTEITLANGEIRKRPLIETNGETGEIVWDKGRDFATVRKVLSMPQVNIVKKTEVQTGGFSKESILPKRNSDKLIARKKDWDPKKYGGFVSPTVAYSVLVVAKVEKGKSKKLKSVKELLGITIMERSSFEKNPIDFLEAKGYKEVKKDLIIKLPKYSLFELENGRKRMLASARELQKGNELALPSKYVNFLYLASHYEKLKGSPEDNEQKQLFVEQHKHYLDEIIEQISEFSKRVILADANLDKVLSAYNKHRDKPIREQAENIIHLFTLTNLGAPAAFKYFDTTIDRKQYRSTKEVLDATLIHQSITGLYETRIDLSQLGGD

SEQ ID NO: 3594 - protein, 1368 aa, synthetic construct
MDKKYSIGLDIGTNSVGWAVITDEYKVPSKKFKVLGNTDRHSIKKNLIGALLFDSGETAEATRLKRTARRRYTRRKNRICYLQEIFSNEMAKVDDSFFHRLEESFLVEEDKKHERHPIFGNIVDEVAYHEKYPTIYHLRKKLVDSTDKADLRLIYLALAHMIKFRGHFLIEGDLNPDNSDVDKLFIQLVQTYNQLFEENPINASGVDAKAILSARLSKSRRLENLIAQLPGEKKNGLFGNLIALSLGLTPNFKSNFDLAEDAKLQLSKDTYDDDLDNLLAQIGDQYADLFLAAKNLSDAILLSDILRVNTEITKAPLSASMIKRYDEHHQDLTLLKALVRQQLPEKYKEIFFDQSKNGYAGYIDGGASQEEFYKFIKPILEKMDGTEELLVKLNREDLLRKQRTFDNGSIPHQIHLGELHAILRRQEDFYPFLKDNREKIEKILTFRIPYYVGPLARGNSRFAWMTRKSEETITPWNFEEVVDKGASAQSFIERMTNFDKNLPNEKVLPKHSLLYEYFTVYNELTKVKYVTEGMRKPAFLSGEQKKAIVDLLFKTNRKVTVKQLKEDYFKKIECFDSVEISGVEDRFNASLGTYHDLLKIIKDKDFLDNEENEDILEDIVLTLTLFEDREMIEERLKTYAHLFDDKVMKQLKRRRYTGWGRLSRKLINGIRDKQSGKTILDFLKSDGFANRNFMQLIHDDSLTFKEDIQKAQVSGQGDSLHEHIANLAGSPAIKKGILQTVKVVDELVKVMGRHKPENIVIEMARENQTTQKGQKNSRERMKRIEEGIKELGSQILKEHPVENTQLQNEKLYLYYLQNGRDMYVDQELDINRLSDYDVDAIVPQSFLKDDSIDNKVLTRSDKNRGKSDNVPSEEVVKKMKNYWRQLLNAKLITQRKFDNLTKAERGGLSELDKAGFIKRQLVETRQITKHVAQILDSRMNTKYDENDKLIREVKVITLKSKLVSDFRKDFQFYKVREINNYHHAHDAYLNAVVGTALIKKYPKLESEFVYGDYKVYDVRKMIAKSEQEIGKATAKYFFYSNIMNFFKTEITLANGEIRKRPLIETNGETGEIVWDKGRDFATVRKVLSMPQVNIVKKTEVQTGGFSKESILPKRNSDKLIARKKDWDPKKYGGFVSPTVAYSVLVVAKVEKGKSKKLKSVKELLGITIMERSSFEKNPIDFLEAKGYKEVKKDLIIKLPKYSLFELENGRKRMLASARELQKGNELALPSKYVNFLYLASHYEKLKGSPEDNEQKQLFVEQHKHYLDEIIEQISEFSKRVILADANLDKVLSAYNKHRDKPIREQAENIIHLFTLTNLGAPAAFKYFDTTIDRKQYRSTKEVLDATLIHQSITGLYETRIDLSQLGGD

SEQ ID NO: 3595 - protein, 1367 aa, synthetic construct
DKKYSIGLDIGTNSVGWAVITDEYKVPSKKFKVLGNTDRHSIKKNLIGALLFDSGETAEATRLKRTARRRYTRRKNRICYLQEIFSNEMAKVDDSFFHRLEESFLVEEDKKHERHPIFGNIVDEVAYHEKYPTIYHLRKKLVDSTDKADLRLIYLALAHMIKFRGHFLIEGDLNPDNSDVDKLFIQLVQTYNQLFEENPINASGVDAKAILSARLSKSRRLENLIAQLPGEKKNGLFGNLIALSLGLTPNFKSNFDLAEDAKLQLSKDTYDDDLDNLLAQIGDQYADLFLAAKNLSDAILLSDILRVNTEITKAPLSASMIKRYDEHHQDLTLLKALVRQQLPEKYKEIFFDQSKNGYAGYIDGGASQEEFYKFIKPILEKMDGTEELLVKLNREDLLRKQRTFDNGSIPHQIHLGELHAILRRQEDFYPFLKDNREKIEKILTFRIPYYVGPLARGNSRFAWMTRKSEETITPWNFEEVVDKGASAQSFIERMTNFDKNLPNEKVLPKHSLLYEYFTVYNELTKVKYVTEGMRKPAFLSGEQKKAIVDLLFKTNRKVTVKQLKEDYFKKIECFDSVEISGVEDRFNASLGTYHDLLKIIKDKDFLDNEENEDILEDIVLTLTLFEDREMIEERLKTYAHLFDDKVMKQLKRRRYTGWGRLSRKLINGIRDKQSGKTILDFLKSDGFANRNFMQLIHDDSLTFKEDIQKAQVSGQGDSLHEHIANLAGSPAIKKGILQTVKVVDELVKVMGRHKPENIVIEMARENQTTQKGQKNSRERMKRIEEGIKELGSQILKEHPVENTQLQNEKLYLYYLQNGRDMYVDQELDINRLSDYDVDAIVPQSFLKDDSIDNKVLTRSDKNRGKSDNVPSEEVVKKMKNYWRQLLNAKLITQRKFDNLTKAERGGLSELDKAGFIKRQLVETRQITKHVAQILDSRMNTKYDENDKLIREVKVITLKSKLVSDFRKDFQFYKVREINNYHHAHDAYLNAVVGTALIKKYPKLESEFVYGDYKVYDVRKMIAKSEQEIGKATAKYFFYSNIMNFFKTEITLANGEIRKRPLIETNGETGEIVWDKGRDFATVRKVLSMPQVNIVKKTEVQTGGFSKESILPKRNSDKLIARKKDWDPKKYGGFVSPTVAYSVLVVAKVEKGKSKKLKSVKELLGITIMERSSFEKNPIDFLEAKGYKEVKKDLIIKLPKYSLFELENGRKRMLASARELQKGNELALPSKYVNFLYLASHYEKLKGSPEDNEQKQLFVEQHKHYLDEIIEQISEFSKRVILADANLDKVLSAYNKHRDKPIREQAENIIHLFTLTNLGAPAAFKYFDTTIDRKQYRSTKEVLDATLIHQSITGLYETRIDLSQLGGD

SEQ ID NO: 3596 - protein, 1368 aa, synthetic construct
MDKKYSIGLDIGTNSVGWAVITDEYKVPSKKFKVLGNTDRHSIKKNLIGALLFDSGETAERTRLKRTARRRYTRRKNRICYLQEIFSNEMAKVDDSFFHRLEESFLVEEDKKHERHPIFGNIVDEVAYHEKYPTIYHLRKKLVDSTDKADLRLIYLALAHMIKFRGHFLIEGDLNPDNSDVDKLFIQLVQTYNQLFEENPINASGVDAKAILSARLSKSRRLENLIAQLPGEKKNGLFGNLIALSLGLTPNFKSNFDLAEDAKLQLSKDTYDDDLDNLLAQIGDQYADLFLAAKNLSDAILLSDILRVNTEITKAPLSASMIKRYDEHHQDLTLLKALVRQQLPEKYKEIFFDQSKNGYAGYIDGGASQEEFYKFIKPILEKMDGTEELLVKLNREDLLRKQRTFDNGSIPHQIHLGELHAILRRQEDFYPFLKDNREKIEKILTFRIPYYVGPLARGNSRFAWMTRKSEETITPWNFEEVVDKGASAQSFIERMTNFDKNLPNEKVLPKHSLLYEYFTVYNELTKVKYVTEGMRKPAFLSGEQKKAIVDLLFKTNRKVTVKQLKEDYFKKIECFDSVEISGVEDRFNASLGTYHDLLKIIKDKDFLDNEENEDILEDIVLTLTLFEDREMIEERLKTYAHLFDDKVMKQLKRRRYTGWGRLSRKLINGIRDKQSGKTILDFLKSDGFANRNFMQLIHDDSLTFKEDIQKAQVSGQGDSLHEHIANLAGSPAIKKGILQTVKVVDELVKVMGRHKPENIVIEMARENQTTQKGQKNSRERMKRIEEGIKELGSQILKEHPVENTQLQNEKLYLYYLQNGRDMYVDQELDINRLSDYDVDHIVPQSFLKDDSIDNKVLTRSDKNRGKSDNVPSEEVVKKMKNYWRQLLNAKLITQRKFDNLTKAERGGLSELDKAGFIKRQLVETRQITKHVAQILDSRMNTKYDENDKLIREVKVITLKSKLVSDFRKDFQFYKVREINNYHHAHDAYLNAVVGTALIKKYPKLESEFVYGDYKVYDVRKMIAKSEQEIGKATAKYFFYSNIMNFFKTEITLANGEIRKRPLIETNGETGEIVWDKGRDFATVRKVLSMPQVNIVKKTEVQTGGFSKESIRPKRNSDKLIARKKDWDPKKYGGFLWPTVAYSVLVVAKVEKGKSKKLKSVKELLGITIMERSSFEKNPIDFLEAKGYKEVKKDLIIKLPKYSLFELENGRKRMLASAKQLQKGNELALPSKYVNFLYLASHYEKLKGSPEDNEQKQLFVEQHKHYLDEIIEQISEFSKRVILADANLDKVLSAYNKHRDKPIREQAENIIHLFTLTRLGAPRAFKYFDTTIDPKQYRSTKEVLDATLIHQSITGLYETRIDLSQLGGD

SEQ ID NO: 3597 - protein, 1368 aa, synthetic construct
MDKKYSIGLDIGTNSVGWAVITDEYKVPSKKFKVLGNTDRHSIKKNLIGALLFDSGETAERTRLKRTARRRYTRRKNRICYLQEIFSNEMAKVDDSFFHRLEESFLVEEDKKHERHPIFGNIVDEVAYHEKYPTIYHLRKKLVDSTDKADLRLIYLALAHMIKFRGHFLIEGDLNPDNSDVDKLFIQLVQTYNQLFEENPINASGVDAKAILSARLSKSRRLENLIAQLPGEKKNGLFGNLIALSLGLTPNFKSNFDLAEDAKLQLSKDTYDDDLDNLLAQIGDQYADLFLAAKNLSDAILLSDILRVNTEITKAPLSASMIKRYDEHHQDLTLLKALVRQQLPEKYKEIFFDQSKNGYAGYIDGGASQEEFYKFIKPILEKMDGTEELLVKLNREDLLRKQRTFDNGSIPHQIHLGELHAILRRQEDFYPFLKDNREKIEKILTFRIPYYVGPLARGNSRFAWMTRKSEETITPWNFEEVVDKGASAQSFIERMTNFDKNLPNEKVLPKHSLLYEYFTVYNELTKVKYVTEGMRKPAFLSGEQKKAIVDLLFKTNRKVTVKQLKEDYFKKIECFDSVEISGVEDRFNASLGTYHDLLKIIKDKDFLDNEENEDILEDIVLTLTLFEDREMIEERLKTYAHLFDDKVMKQLKRRRYTGWGRLSRKLINGIRDKQSGKTILDFLKSDGFANRNFMQLIHDDSLTFKEDIQKAQVSGQGDSLHEHIANLAGSPAIKKGILQTVKVVDELVKVMGRHKPENIVIEMARENQTTQKGQKNSRERMKRIEEGIKELGSQILKEHPVENTQLQNEKLYLYYLQNGRDMYVDQELDINRLSDYDVDAIVPQSFLKDDSIDNKVLTRSDKNRGKSDNVPSEEVVKKMKNYWRQLLNAKLITQRKFDNLTKAERGGLSELDKAGFIKRQLVETRQITKHVAQILDSRMNTKYDENDKLIREVKVITLKSKLVSDFRKDFQFYKVREINNYHHAHDAYLNAVVGTALIKKYPKLESEFVYGDYKVYDVRKMIAKSEQEIGKATAKYFFYSNIMNFFKTEITLANGEIRKRPLIETNGETGEIVWDKGRDFATVRKVLSMPQVNIVKKTEVQTGGFSKESIRPKRNSDKLIARKKDWDPKKYGGFLWPTVAYSVLVVAKVEKGKSKKLKSVKELLGITIMERSSFEKNPIDFLEAKGYKEVKKDLIIKLPKYSLFELENGRKRMLASAKQLQKGNELALPSKYVNFLYLASHYEKLKGSPEDNEQKQLFVEQHKHYLDEIIEQISEFSKRVILADANLDKVLSAYNKHRDKPIREQAENIIHLFTLTRLGAPRAFKYFDTTIDPKQYRSTKEVLDATLIHQSITGLYETRIDLSQLGGD

SEQ ID NO: 3598 - protein, 1367 aa, synthetic construct
DKKYSIGLDIGTNSVGWAVITDEYKVPSKKFKVLGNTDRHSIKKNLIGALLFDSGETAERTRLKRTARRRYTRRKNRICYLQEIFSNEMAKVDDSFFHRLEESFLVEEDKKHERHPIFGNIVDEVAYHEKYPTIYHLRKKLVDSTDKADLRLIYLALAHMIKFRGHFLIEGDLNPDNSDVDKLFIQLVQTYNQLFEENPINASGVDAKAILSARLSKSRRLENLIAQLPGEKKNGLFGNLIALSLGLTPNFKSNFDLAEDAKLQLSKDTYDDDLDNLLAQIGDQYADLFLAAKNLSDAILLSDILRVNTEITKAPLSASMIKRYDEHHQDLTLLKALVRQQLPEKYKEIFFDQSKNGYAGYIDGGASQEEFYKFIKPILEKMDGTEELLVKLNREDLLRKQRTFDNGSIPHQIHLGELHAILRRQEDFYPFLKDNREKIEKILTFRIPYYVGPLARGNSRFAWMTRKSEETITPWNFEEVVDKGASAQSFIERMTNFDKNLPNEKVLPKHSLLYEYFTVYNELTKVKYVTEGMRKPAFLSGEQKKAIVDLLFKTNRKVTVKQLKEDYFKKIECFDSVEISGVEDRFNASLGTYHDLLKIIKDKDFLDNEENEDILEDIVLTLTLFEDREMIEERLKTYAHLFDDKVMKQLKRRRYTGWGRLSRKLINGIRDKQSGKTILDFLKSDGFANRNFMQLIHDDSLTFKEDIQKAQVSGQGDSLHEHIANLAGSPAIKKGILQTVKVVDELVKVMGRHKPENIVIEMARENQTTQKGQKNSRERMKRIEEGIKELGSQILKEHPVENTQLQNEKLYLYYLQNGRDMYVDQELDINRLSDYDVDAIVPQSFLKDDSIDNKVLTRSDKNRGKSDNVPSEEVVKKMKNYWRQLLNAKLITQRKFDNLTKAERGGLSELDKAGFIKRQLVETRQITKHVAQILDSRMNTKYDENDKLIREVKVITLKSKLVSDFRKDFQFYKVREINNYHHAHDAYLNAVVGTALIKKYPKLESEFVYGDYKVYDVRKMIAKSEQEIGKATAKYFFYSNIMNFFKTEITLANGEIRKRPLIETNGETGEIVWDKGRDFATVRKVLSMPQVNIVKKTEVQTGGFSKESIRPKRNSDKLIARKKDWDPKKYGGFLWPTVAYSVLVVAKVEKGKSKKLKSVKELLGITIMERSSFEKNPIDFLEAKGYKEVKKDLIIKLPKYSLFELENGRKRMLASAKQLQKGNELALPSKYVNFLYLASHYEKLKGSPEDNEQKQLFVEQHKHYLDEIIEQISEFSKRVILADANLDKVLSAYNKHRDKPIREQAENIIHLFTLTRLGAPRAFKYFDTTIDPKQYRSTKEVLDATLIHQSITGLYETRIDLSQLGGD

SEQ ID NO: 3599 - protein, 1057 aa, synthetic construct
MNQKFILGLDIGITSVGYGLIDYETKNIIDAGVRLFPEANVENNEGRRSKRGSRRLKRRRIHRLERVKLLLTEYDLINKEQIPTSNNPYQIRVKGLSEILSKDELAIALLHLAKRRGIHNVDVAADKEETASDSLSTKDQINKNAKFLESRYVCELQKERLENEGHVRGVENRFLTKDIVREAKKIIDTQMQYYPEIDETFKEKYISLVETRREYFEGPGQGSPFGWNGDLKKWYEMLMGHCTYFPQELRSVKYAYSADLFNALNDLNNLIIQRDNSEKLEYHEKYHIIENVFKQKKKPTLKQIAKEIGVNPEDIKGYRITKSGTPEFTSFKLFHDLKKVVKDHAILDDIDLLNQIAEILTIYQDKDSIVAELGQLEYLMSEADKQSISELTGYTGTHSLSLKCMNMIIDELWHSSMNQMEVFTYLNMRPKKYELKGYQRIPTDMIDDAILSPVVKRTFIQSINVINKVIEKYGIPEDIIIELARENNSDDRKKFINNLQKKNEATRKRINEIIGQTGNQNAKRIVEKIRLHDQQEGKCLYSLESIPLEDLLNNPNHYEVDHIIPRSVSFDNSYHNKVLVKQSENSKKSNLTPYQYFNSGKSKLSYNQFKQHILNLSKSQDRISKKKKEYLLEERDINKFEVQKEFINRNLVDTRYATRELTNYLKAYFSANNMNVKVKTINGSFTDYLRKVWKFKKERNHGYKHHAEDALIIANADFLFKENKKLKAVNSVLEKPEIETKQLDIQVDSEDNYSEMFIIPKQVQDIKDFRNFKYSHRVDKKPNRQLINDTLYSTRKKDNSTYIVQTIKDIYAKDNTTLKKQFDKSPEKFLMYQHDPRTFEKLEVIMKQYANEKNPLAKYHEETGEYLTKYSKKNNGPIVKSLKYIGNKLGSHLDVTHQFKSSTKKLVKLSIKNYRFDVYLTEKGYKFVTIAYLNVFKKDNYYYIPKDKYQELKEKKKIKDTDQFIASFYKNDLIKLNGDLYKIIGVNSDDRNIIELDYYDIKYKDYCEINNIKGEPRIKKTIGKKTESIEKFTTDVLGNLYLHSTEKAPQLIFKRGL

SEQ ID NO: 3600 - protein, 1057 aa, synthetic construct
MNQKFILGLDIGITSVGYGLIDYETKNIIDAGVRLFPEANVENNEGRRSKRGSRRLKRRRIHRLERVKLLLTEYDLINKEQIPTSNNPYQIRVKGLSEILSKDELAIALLHLAKRRGIHNVDVAADKEETASDSLSTKDQINKNAKFLESRYVCELQKERLENEGHVRGVENRFLTKDIVREAKKIIDTQMQYYPEIDETFKEKYISLVETRREYFEGPGQGSPFGWNGDLKKWYEMLMGHCTYFPQELRSVKYAYSADLFNALNDLNNLIIQRDNSEKLEYHEKYHIIENVFKQKKKPTLKQIAKEIGVNPEDIKGYRITKSGTPEFTSFKLFHDLKKVVKDHAILDDIDLLNQIAEILTIYQDKDSIVAELGQLEYLMSEADKQSISELTGYTGTHSLSLKCMNMIIDELWHSSMNQMEVFTYLNMRPKKYELKGYQRIPTDMIDDAILSPVVKRTFIQSINVINKVIEKYGIPEDIIIELARENNSDDRKKFINNLQKKNEATRKRINEIIGQTGNQNAKRIVEKIRLHDQQEGKCLYSLESIPLEDLLNNPNHYEVDHIIPRSVSFDNSYHNKVLVKQSEASKKSNLTPYQYFNSGKSKLSYNQFKQHILNLSKSQDRISKKKKEYLLEERDINKFEVQKEFINRNLVDTRYATRELTNYLKAYFSANNMNVKVKTINGSFTDYLRKVWKFKKERNHGYKHHAEDALIIANADFLFKENKKLKAVNSVLEKPEIETKQLDIQVDSEDNYSEMFIIPKQVQDIKDFRNFKYSHRVDKKPNRQLINDTLYSTRKKDNSTYIVQTIKDIYAKDNTTLKKQFDKSPEKFLMYQHDPRTFEKLEVIMKQYANEKNPLAKYHEETGEYLTKYSKKNNGPIVKSLKYIGNKLGSHLDVTHQFKSSTKKLVKLSIKNYRFDVYLTEKGYKFVTIAYLNVFKKDNYYYIPKDKYQELKEKKKIKDTDQFIASFYKNDLIKLNGDLYKIIGVNSDDRNIIELDYYDIKYKDYCEINNIKGEPRIKKTIGKKTESIEKFTTDVLGNLYLHSTEKAPQLIFKRGL

SEQ ID NO: 3601 - protein, 1056 aa, synthetic construct
NQKFILGLDIGITSVGYGLIDYETKNIIDAGVRLFPEANVENNEGRRSKRGSRRLKRRRIHRLERVKLLLTEYDLINKEQIPTSNNPYQIRVKGLSEILSKDELAIALLHLAKRRGIHNVDVAADKEETASDSLSTKDQINKNAKFLESRYVCELQKERLENEGHVRGVENRFLTKDIVREAKKIIDTQMQYYPEIDETFKEKYISLVETRREYFEGPGQGSPFGWNGDLKKWYEMLMGHCTYFPQELRSVKYAYSADLFNALNDLNNLIIQRDNSEKLEYHEKYHIIENVFKQKKKPTLKQIAKEIGVNPEDIKGYRITKSGTPEFTSFKLFHDLKKVVKDHAILDDIDLLNQIAEILTIYQDKDSIVAELGQLEYLMSEADKQSISELTGYTGTHSLSLKCMNMIIDELWHSSMNQMEVFTYLNMRPKKYELKGYQRIPTDMIDDAILSPVVKRTFIQSINVINKVIEKYGIPEDIIIELARENNSDDRKKFINNLQKKNEATRKRINEIIGQTGNQNAKRIVEKIRLHDQQEGKCLYSLESIPLEDLLNNPNHYEVDHIIPRSVSFDNSYHNKVLVKQSEASKKSNLTPYQYFNSGKSKLSYNQFKQHILNLSKSQDRISKKKKEYLLEERDINKFEVQKEFINRNLVDTRYATRELTNYLKAYFSANNMNVKVKTINGSFTDYLRKVWKFKKERNHGYKHHAEDALIIANADFLFKENKKLKAVNSVLEKPEIETKQLDIQVDSEDNYSEMFIIPKQVQDIKDFRNFKYSHRVDKKPNRQLINDTLYSTRKKDNSTYIVQTIKDIYAKDNTTLKKQFDKSPEKFLMYQHDPRTFEKLEVIMKQYANEKNPLAKYHEETGEYLTKYSKKNNGPIVKSLKYIGNKLGSHLDVTHQFKSSTKKLVKLSIKNYRFDVYLTEKGYKFVTIAYLNVFKKDNYYYIPKDKYQELKEKKKIKDTDQFIASFYKNDLIKLNGDLYKIIGVNSDDRNIIELDYYDIKYKDYCEINNIKGEPRIKKTIGKKTESIEKFTTDVLGNLYLHSTEKAPQLIFKRGL

SEQ ID NO: 3602 - protein, 1057 aa, synthetic construct
MNQKFILGLDIGITSVGYGLIDYETKNIIDAGVRLFPEANVENNEGRRSKRGSRRLKRRRIHRLERVKLLLTEYDLINKEQIPTSNNPYQIRVKGLSEILSKDELAIALLHLAKRRGIHNVDVAADKEETASDSLSTKDQINKNAKFLESRYVCELQKERLENEGHVRGVENRFLTKDIVREAKKIIDTQMQYYPEIDETFKEKYISLVETRREYFEGPGQGSPFGWNGDLKKWYEMLMGHCTYFPQELRSVKYAYSADLFNALNDLNNLIIQRDNSEKLEYHEKYHIIENVFKQKKKPTLKQIAKEIGVNPEDIKGYRITKSGTPEFTSFKLFHDLKKVVKDHAILDDIDLLNQIAEILTIYQDKDSIVAELGQLEYLMSEADKQSISELTGYTGTHSLSLKCMNMIIDELWHSSMNQMEVFTYLNMRPKKYELKGYQRIPTDMIDDAILSPVVKRTFIQSINVINKVIEKYGIPEDIIIELARENNSDDRKKFINNLQKKNEATRKRINEIIGQTGNQNAKRIVEKIRLHDQQEGKCLYSLESIPLEDLLNNPNHYEVDHIIPRSVSFDNSYHNKVLVKQSENSKKSNLTPYQYFNSGKSKLSYNQFKQHILNLSKSQDRISKKKKEYLLEERDINKFEVQKEFINRNLVDTRYATRELTSYLKAYFSANNMDVKVKTINGSFTNHLRKVWRFDKYRNHGYKHHAEDALIIANADFLFKENKKLQNTNKILEKPTIENNTKKVTVEKEEDYNNVFETPKLVEDIKQYRDYKFSHRVDKKPNRQLINDTLYSTRMKDEHDYIVQTITDIYGKDNTNLKKQFNKNPEKFLMYQNDPKTFEKLSIIMKQYSDEKNPLAKYYEETGEYLTKYSKKNNGPIVKKIKLLGNKVGNHLDVTNKYENSTKKLVKLSIKNYRFDVYLTEKGYKFVTIAYLNVFKKDNYYYIPKDKYQELKEKKKIKDTDQFIASFYKNDLIKLNGDLYKIIGVNSDDRNIIELDYYDIKYKDYCEINNIKGEPRIKKTIGKKTESIEKFTTDVLGNLYLHSTEKAPQLIFKRGL

SEQ ID NO: 3603 - protein, 1057 aa, synthetic construct
MNQKFILGLDIGITSVGYGLIDYETKNIIDAGVRLFPEANVENNEGRRSKRGSRRLKRRRIHRLERVKLLLTEYDLINKEQIPTSNNPYQIRVKGLSEILSKDELAIALLHLAKRRGIHNVDVAADKEETASDSLSTKDQINKNAKFLESRYVCELQKERLENEGHVRGVENRFLTKDIVREAKKIIDTQMQYYPEIDETFKEKYISLVETRREYFEGPGQGSPFGWNGDLKKWYEMLMGHCTYFPQELRSVKYAYSADLFNALNDLNNLIIQRDNSEKLEYHEKYHIIENVFKQKKKPTLKQIAKEIGVNPEDIKGYRITKSGTPEFTSFKLFHDLKKVVKDHAILDDIDLLNQIAEILTIYQDKDSIVAELGQLEYLMSEADKQSISELTGYTGTHSLSLKCMNMIIDELWHSSMNQMEVFTYLNMRPKKYELKGYQRIPTDMIDDAILSPVVKRTFIQSINVINKVIEKYGIPEDIIIELARENNSDDRKKFINNLQKKNEATRKRINEIIGQTGNQNAKRIVEKIRLHDQQEGKCLYSLESIPLEDLLNNPNHYEVDHIIPRSVSFDNSYHNKVLVKQSEASKKSNLTPYQYFNSGKSKLSYNQFKQHILNLSKSQDRISKKKKEYLLEERDINKFEVQKEFINRNLVDTRYATRELTSYLKAYFSANNMDVKVKTINGSFTNHLRKVWRFDKYRNHGYKHHAEDALIIANADFLFKENKKLQNTNKILEKPTIENNTKKVTVEKEEDYNNVFETPKLVEDIKQYRDYKFSHRVDKKPNRQLINDTLYSTRMKDEHDYIVQTITDIYGKDNTNLKKQFNKNPEKFLMYQNDPKTFEKLSIIMKQYSDEKNPLAKYYEETGEYLTKYSKKNNGPIVKKIKLLGNKVGNHLDVTNKYENSTKKLVKLSIKNYRFDVYLTEKGYKFVTIAYLNVFKKDNYYYIPKDKYQELKEKKKIKDTDQFIASFYKNDLIKLNGDLYKIIGVNSDDRNIIELDYYDIKYKDYCEINNIKGEPRIKKTIGKKTESIEKFTTDVLGNLYLHSTEKAPQLIFKRGL

SEQ ID NO: 3604 - protein, 1056 aa, synthetic construct
NQKFILGLDIGITSVGYGLIDYETKNIIDAGVRLFPEANVENNEGRRSKRGSRRLKRRRIHRLERVKLLLTEYDLINKEQIPTSNNPYQIRVKGLSEILSKDELAIALLHLAKRRGIHNVDVAADKEETASDSLSTKDQINKNAKFLESRYVCELQKERLENEGHVRGVENRFLTKDIVREAKKIIDTQMQYYPEIDETFKEKYISLVETRREYFEGPGQGSPFGWNGDLKKWYEMLMGHCTYFPQELRSVKYAYSADLFNALNDLNNLIIQRDNSEKLEYHEKYHIIENVFKQKKKPTLKQIAKEIGVNPEDIKGYRITKSGTPEFTSFKLFHDLKKVVKDHAILDDIDLLNQIAEILTIYQDKDSIVAELGQLEYLMSEADKQSISELTGYTGTHSLSLKCMNMIIDELWHSSMNQMEVFTYLNMRPKKYELKGYQRIPTDMIDDAILSPVVKRTFIQSINVINKVIEKYGIPEDIIIELARENNSDDRKKFINNLQKKNEATRKRINEIIGQTGNQNAKRIVEKIRLHDQQEGKCLYSLESIPLEDLLNNPNHYEVDHIIPRSVSFDNSYHNKVLVKQSEASKKSNLTPYQYFNSGKSKLSYNQFKQHILNLSKSQDRISKKKKEYLLEERDINKFEVQKEFINRNLVDTRYATRELTSYLKAYFSANNMDVKVKTINGSFTNHLRKVWRFDKYRNHGYKHHAEDALIIANADFLFKENKKLQNTNKILEKPTIENNTKKVTVEKEEDYNNVFETPKLVEDIKQYRDYKFSHRVDKKPNRQLINDTLYSTRMKDEHDYIVQTITDIYGKDNTNLKKQFNKNPEKFLMYQNDPKTFEKLSIIMKQYSDEKNPLAKYYEETGEYLTKYSKKNNGPIVKKIKLLGNKVGNHLDVTNKYENSTKKLVKLSIKNYRFDVYLTEKGYKFVTIAYLNVFKKDNYYYIPKDKYQELKEKKKIKDTDQFIASFYKNDLIKLNGDLYKIIGVNSDDRNIIELDYYDIKYKDYCEINNIKGEPRIKKTIGKKTESIEKFTTDVLGNLYLHSTEKAPQLIFKRGL

SEQ ID NO: 3605 - protein, 1368 aa, synthetic construct
MDKKYSIGLDIGTNSVGWAVITDEYKVPSKKFKVLGNTDRHSIKKNLIGALLFDSGETAEATRLKRTARRRYTRRKNRICYLQEIFSNEMAKVDDSFFHRLEESFLVEEDKKHERHPIFGNIVDEVAYHEKYPTIYHLRKKLVDSTDKADLRLIYLALAHMIKFRGHFLIEGDLNPDNSDVDKLFIQLVQTYNQLFEENPINASGVDAKAILSARLSKSRRLENLIAQLPGEKKNGLFGNLIALSLGLTPNFKSNFDLAEDAKLQLSKDTYDDDLDNLLAQIGDQYADLFLAAKNLSDAILLSDILRVNTEITKAPLSASMIKRYDEHHQDLTLLKALVRQQLPEKYKEIFFDQSKNGYAGYIDGGASQEEFYKFIKPILEKMDGTEELLVKLNREDLLRKQRTFDNGSIPHQIHLGELHAILRRQEDFYPFLKDNREKIEKILTFRIPYYVGPLARGNSRFAWMTRKSEETITPWNFEEVVDKGASAQSFIERMTNFDKNLPNEKVLPKHSLLYEYFTVYNELTKVKYVTEGMRKPAFLSGEQKKAIVDLLFKTNRKVTVKQLKEDYFKKIECFDSVEISGVEDRFNASLGTYHDLLKIIKDKDFLDNEENEDILEDIVLTLTLFEDREMIEERLKTYAHLFDDKVMKQLKRRRYTGWGRLSRKLINGIRDKQSGKTILDFLKSDGFANRNFMQLIHDDSLTFKEDIQKAQVSGQGDSLHEHIANLAGSPAIKKGILQTVKVVDELVKVMGRHKPENIVIEMARENQTTQKGQKNSRERMKRIEEGIKELGSQILKEHPVENTQLQNEKLYLYYLQNGRDMYVDQELDINRLSDYDVDHIVPQSFLKDDSIDNKVLTRSDKNRGKSDNVPSEEVVKKMKNYWRQLLNAKLITQRKFDNLTKAERGGLSELDKAGFIKRQLVETRQITKHVAQILDSRMNTKYDENDKLIREVKVITLKSKLVSDFRKDFQFYKVREINNYHHAHDAYLNAVVGTALIKKYPKLESEFVYGDYKVYDVRKMIAKSEQEIGKATAKYFFYSNIMNFFKTEITLANGEIRKRPLIETNGETGEIVWDKGRDFATVRKVLSMPQVNIVKKTEVQTGGFSKESILPKRNSDKLIARKKDWDPKKYGGFLWPTVAYSVLVVAKVEKGKSKKLKSVKELLGITIMERSSFEKNPIDFLEAKGYKEVKKDLIIKLPKYSLFELENGRKRMLASAKQLQKGNELALPSKYVNFLYLASHYEKLKGSPEDNEQKQLFVEQHKHYLDEIIEQISEFSKRVILADANLDKVLSAYNKHRDKPIREQAENIIHLFTLTNLGAPAAFKYFDTTIDRKQYRSTKEVLDATLIHQSITGLYETRIDLSQLGGD

SEQ ID NO: 3606 - protein, 1368 aa, synthetic construct
MDKKYSIGLDIGTNSVGWAVITDEYKVPSKKFKVLGNTDRHSIKKNLIGALLFDSGETAEATRLKRTARRRYTRRKNRICYLQEIFSNEMAKVDDSFFHRLEESFLVEEDKKHERHPIFGNIVDEVAYHEKYPTIYHLRKKLVDSTDKADLRLIYLALAHMIKFRGHFLIEGDLNPDNSDVDKLFIQLVQTYNQLFEENPINASGVDAKAILSARLSKSRRLENLIAQLPGEKKNGLFGNLIALSLGLTPNFKSNFDLAEDAKLQLSKDTYDDDLDNLLAQIGDQYADLFLAAKNLSDAILLSDILRVNTEITKAPLSASMIKRYDEHHQDLTLLKALVRQQLPEKYKEIFFDQSKNGYAGYIDGGASQEEFYKFIKPILEKMDGTEELLVKLNREDLLRKQRTFDNGSIPHQIHLGELHAILRRQEDFYPFLKDNREKIEKILTFRIPYYVGPLARGNSRFAWMTRKSEETITPWNFEEVVDKGASAQSFIERMTNFDKNLPNEKVLPKHSLLYEYFTVYNELTKVKYVTEGMRKPAFLSGEQKKAIVDLLFKTNRKVTVKQLKEDYFKKIECFDSVEISGVEDRFNASLGTYHDLLKIIKDKDFLDNEENEDILEDIVLTLTLFEDREMIEERLKTYAHLFDDKVMKQLKRRRYTGWGRLSRKLINGIRDKQSGKTILDFLKSDGFANRNFMQLIHDDSLTFKEDIQKAQVSGQGDSLHEHIANLAGSPAIKKGILQTVKVVDELVKVMGRHKPENIVIEMARENQTTQKGQKNSRERMKRIEEGIKELGSQILKEHPVENTQLQNEKLYLYYLQNGRDMYVDQELDINRLSDYDVDAIVPQSFLKDDSIDNKVLTRSDKNRGKSDNVPSEEVVKKMKNYWRQLLNAKLITQRKFDNLTKAERGGLSELDKAGFIKRQLVETRQITKHVAQILDSRMNTKYDENDKLIREVKVITLKSKLVSDFRKDFQFYKVREINNYHHAHDAYLNAVVGTALIKKYPKLESEFVYGDYKVYDVRKMIAKSEQEIGKATAKYFFYSNIMNFFKTEITLANGEIRKRPLIETNGETGEIVWDKGRDFATVRKVLSMPQVNIVKKTEVQTGGFSKESILPKRNSDKLIARKKDWDPKKYGGFLWPTVAYSVLVVAKVEKGKSKKLKSVKELLGITIMERSSFEKNPIDFLEAKGYKEVKKDLIIKLPKYSLFELENGRKRMLASAKQLQKGNELALPSKYVNFLYLASHYEKLKGSPEDNEQKQLFVEQHKHYLDEIIEQISEFSKRVILADANLDKVLSAYNKHRDKPIREQAENIIHLFTLTNLGAPAAFKYFDTTIDRKQYRSTKEVLDATLIHQSITGLYETRIDLSQLGGD

SEQ ID NO: 3607 - protein, 1367 aa, synthetic construct
DKKYSIGLDIGTNSVGWAVITDEYKVPSKKFKVLGNTDRHSIKKNLIGALLFDSGETAEATRLKRTARRRYTRRKNRICYLQEIFSNEMAKVDDSFFHRLEESFLVEEDKKHERHPIFGNIVDEVAYHEKYPTIYHLRKKLVDSTDKADLRLIYLALAHMIKFRGHFLIEGDLNPDNSDVDKLFIQLVQTYNQLFEENPINASGVDAKAILSARLSKSRRLENLIAQLPGEKKNGLFGNLIALSLGLTPNFKSNFDLAEDAKLQLSKDTYDDDLDNLLAQIGDQYADLFLAAKNLSDAILLSDILRVNTEITKAPLSASMIKRYDEHHQDLTLLKALVRQQLPEKYKEIFFDQSKNGYAGYIDGGASQEEFYKFIKPILEKMDGTEELLVKLNREDLLRKQRTFDNGSIPHQIHLGELHAILRRQEDFYPFLKDNREKIEKILTFRIPYYVGPLARGNSRFAWMTRKSEETITPWNFEEVVDKGASAQSFIERMTNFDKNLPNEKVLPKHSLLYEYFTVYNELTKVKYVTEGMRKPAFLSGEQKKAIVDLLFKTNRKVTVKQLKEDYFKKIECFDSVEISGVEDRFNASLGTYHDLLKIIKDKDFLDNEENEDILEDIVLTLTLFEDREMIEERLKTYAHLFDDKVMKQLKRRRYTGWGRLSRKLINGIRDKQSGKTILDFLKSDGFANRNFMQLIHDDSLTFKEDIQKAQVSGQGDSLHEHIANLAGSPAIKKGILQTVKVVDELVKVMGRHKPENIVIEMARENQTTQKGQKNSRERMKRIEEGIKELGSQILKEHPVENTQLQNEKLYLYYLQNGRDMYVDQELDINRLSDYDVDAIVPQSFLKDDSIDNKVLTRSDKNRGKSDNVPSEEVVKKMKNYWRQLLNAKLITQRKFDNLTKAERGGLSELDKAGFIKRQLVETRQITKHVAQILDSRMNTKYDENDKLIREVKVITLKSKLVSDFRKDFQFYKVREINNYHHAHDAYLNAVVGTALIKKYPKLESEFVYGDYKVYDVRKMIAKSEQEIGKATAKYFFYSNIMNFFKTEITLANGEIRKRPLIETNGETGEIVWDKGRDFATVRKVLSMPQVNIVKKTEVQTGGFSKESILPKRNSDKLIARKKDWDPKKYGGFLWPTVAYSVLVVAKVEKGKSKKLKSVKELLGITIMERSSFEKNPIDFLEAKGYKEVKKDLIIKLPKYSLFELENGRKRMLASAKQLQKGNELALPSKYVNFLYLASHYEKLKGSPEDNEQKQLFVEQHKHYLDEIIEQISEFSKRVILADANLDKVLSAYNKHRDKPIREQAENIIHLFTLTNLGAPAAFKYFDTTIDRKQYRSTKEVLDATLIHQSITGLYETRIDLSQLGGD

SEQ ID NO: 3608 - protein, 7 aa, synthetic construct
PKKKRKV

SEQ ID NO: 3609 - protein, 19 aa, synthetic construct
MKRTADGSEFESPKKKRKV

SEQ ID NO: 3610 - protein, 30 aa, synthetic construct
MDSLLMNRRKFLYQFKNVRWAKGRRETYLC

SEQ ID NO: 3611 - protein, 20 aa, synthetic construct
AVKRPAATKKAGQAKKKKLD

SEQ ID NO: 3612 - protein, 25 aa, synthetic construct
MSRRRKANPTKLSENAKKLAKEVEN

SEQ ID NO: 3613 - protein, 9 aa, synthetic construct
PAAKRVKLD

SEQ ID NO: 3614 - protein, 9 aa, synthetic construct
KLKIKRPVK

SEQ ID NO: 3615 - protein, 8 aa, synthetic construct
VSRKRPRP

SEQ ID NO: 3616 - protein, 10 aa, synthetic construct
EGAPPAKRAR

SEQ ID NO: 3617 - protein, 12 aa, synthetic construct
PPQPKKKPLDGE

SEQ ID NO: 3618 - protein, 21 aa, synthetic construct
SGGSKRTADGSEFEPKKKRKV

SEQ ID NO: 3619 - RNA, 33 nt, synthetic construct
  source 1..33: mol_type = other RNA
gccaacatgaggatcacccatgtctgcagggcc

SEQ ID NO: 3620 - protein, 131 aa, synthetic construct
GSASNFTQFVLVDNGGTGDVTVAPSNFANGVAEWISSNSRSQAYKVTCSVRQSSAQNRKYTIKVEVPKVATQTVGGEELPVAGWRSYLNMELTIPIFATNSDCELIVKAMQGLLKDGNPIPSAIAANSGIY

SEQ ID NO: 3621 - protein, 2117 aa, synthetic construct
MKRTADGSEFESPKKKRKVDKKYSIGLDIGTNSVGWAVITDEYKVPSKKFKVLGNTDRHSIKKNLIGALLFDSGETAEATRLKRTARRRYTRRKNRICYLQEIFSNEMAKVDDSFFHRLEESFLVEEDKKHERHPIFGNIVDEVAYHEKYPTIYHLRKKLVDSTDKADLRLIYLALAHMIKFRGHFLIEGDLNPDNSDVDKLFIQLVQTYNQLFEENPINASGVDAKAILSARLSKSRRLENLIAQLPGEKKNGLFGNLIALSLGLTPNFKSNFDLAEDAKLQLSKDTYDDDLDNLLAQIGDQYADLFLAAKNLSDAILLSDILRVNTEITKAPLSASMIKRYDEHHQDLTLLKALVRQQLPEKYKEIFFDQSKNGYAGYIDGGASQEEFYKFIKPILEKMDGTEELLVKLNREDLLRKQRTFDNGSIPHQIHLGELHAILRRQEDFYPFLKDNREKIEKILTFRIPYYVGPLARGNSRFAWMTRKSEETITPWNFEEVVDKGASAQSFIERMTNFDKNLPNEKVLPKHSLLYEYFTVYNELTKVKYVTEGMRKPAFLSGEQKKAIVDLLFKTNRKVTVKQLKEDYFKKIECFDSVEISGVEDRFNASLGTYHDLLKIIKDKDFLDNEENEDILEDIVLTLTLFEDREMIEERLKTYAHLFDDKVMKQLKRRRYTGWGRLSRKLINGIRDKQSGKTILDFLKSDGFANRNFMQLIHDDSLTFKEDIQKAQVSGQGDSLHEHIANLAGSPAIKKGILQTVKVVDELVKVMGRHKPENIVIEMARENQTTQKGQKNSRERMKRIEEGIKELGSQILKEHPVENTQLQNEKLYLYYLQNGRDMYVDQELDINRLSDYDVDAIVPQSFLKDDSIDNKVLTRSDKNRGKSDNVPSEEVVKKMKNYWRQLLNAKLITQRKFDNLTKAERGGLSELDKAGFIKRQLVETRQITKHVAQILDSRMNTKYDENDKLIREVKVITLKSKLVSDFRKDFQFYKVREINNYHHAHDAYLNAVVGTALIKKYPKLESEFVYGDYKVYDVRKMIAKSEQEIGKATAKYFFYSNIMNFFKTEITLANGEIRKRPLIETNGETGEIVWDKGRDFATVRKVLSMPQVNIVKKTEVQTGGFSKESILPKRNSDKLIARKKDWDPKKYGGFDSPTVAYSVLVVAKVEKGKSKKLKSVKELLGITIMERSSFEKNPIDFLEAKGYKEVKKDLIIKLPKYSLFELENGRKRMLASAGELQKGNELALPSKYVNFLYLASHYEKLKGSPEDNEQKQLFVEQHKHYLDEIIEQISEFSKRVILADANLDKVLSAYNKHRDKPIREQAENIIHLFTLTNLGAPAAFKYFDTTIDRKRYTSTKEVLDATLIHQSITGLYETRIDLSQLGGDSGGSSGGSSGSETPGTSESATPESSGGSSGGSSTLNIEDEYRLHETSKEPDVSLGSTWLSDFPQAWAETGGMGLAVRQAPLIIPLKATSTPVSIKQYPMSQEARLGIKPHIQRLLDQGILVPCQSPWNTPLLPVKKPGTNDYRPVQDLREVNKRVEDIHPTVPNPYNLLSGLPPSHQWYTVLDLKDAFFCLRLHPTSQPLFAFEWRDPEMGISGQLTWTRLPQGFKNSPTLFNEALHRDLADFRIQHPDLILLQYVDDLLLAATSELDCQQGTRALLQTLGNLGYRASAKKAQICQKQVKYLGYLLKEGQRWLTEARKETVMGQPTPKTPRQLREFLGKAGFCRLFIPGFAEMAAPLYPLTKPGTLFNWGPDQQKAYQEIKQALLTAPALGLPDLTKPFELFVDEKQGYAKGVLTQKLGPWRRPVAYLSKKLDPVAAGWPPCLRMVAAIAVLTKDAGKLTMGQPLVILAPHAVEALVKQPPDRWLSNARMTHYQALLLDTDRVQFGPVVALNPATLLPLPEEGLQHNCLDILAEAHGTRPDLTDQPLPDADHTWYTDGSSLLQEGQRKAGAAVTTETEVIWAKALPAGTSAQRAELIALTQALKMAEGKKLNVYTDSRYAFATAHIHGEIYRRRGWLTSEGKEIKNKDEILALLKALFLPKRLSIIHCPGHQKGHSAEARGNRMADQAARKAAITETPDTSTLLIENSSPSGGSKRTADGSEFEPKKKRKV

SEQ ID NO: 3622 - protein, 2131 aa, synthetic construct
MKRTADGSEFESPKKKRKVDKKYSIGLDIGTNSVGWAVITDEYKVPSKKFKVLGNTDRHSIKKNLIGALLFDSGETAEATRLKRTARRRYTRRKNRICYLQEIFSNEMAKVDDSFFHRLEESFLVEEDKKHERHPIFGNIVDEVAYHEKYPTIYHLRKKLVDSTDKADLRLIYLALAHMIKFRGHFLIEGDLNPDNSDVDKLFIQLVQTYNQLFEENPINASGVDAKAILSARLSKSRKLENLIAQLPGEKKNGLFGNLIALSLGLTPNFKSNFDLAEDAKLQLSKDTYDDDLDNLLAQIGDQYADLFLAAKNLSDAILLSDILRVNTEITKAPLSASMIKRYDEHHQDLTLLKALVRQQLPEKYKEIFFDQSKNGYAGYIDGGASQEEFYKFIKPILEKMDGTEELLVKLKREDLLRKQRTFDNGSIPHQIHLGELHAILRRQEDFYPFLKDNREKIEKILTFRIPYYVGPLARGNSRFAWMTRKSEETITPWNFEEVVDKGASAQSFIERMTNFDKNLPNEKVLPKHSLLYEYFTVYNELTKVKYVTEGMRKPAFLSGEQKKAIVDLLFKTNRKVTVKQLKEDYFKKIECFDSVEISGVEDRFNASLGTYHDLLKIIKDKDFLDNEENEDILEDIVLTLTLFEDREMIEERLKTYAHLFDDKVMKQLKRRRYTGWGRLSRKLINGIRDKQSGKTILDFLKSDGFANRNFMQLIHDDSLTFKEDIQKAQVSGQGDSLHEHIANLAGSPAIKKGILQTVKVVDELVKVMGRHKPENIVIEMARENQTTQKGQKNSRERMKRIEEGIKELGSQILKEHPVENTQLQNEKLYLYYLQNGRDMYVDQELDINRLSDYDVDAIVPQSFLKDDSIDNKVLTRSDKNRGKSDNVPSEEVVKKMKNYWRQLLNAKLITQRKFDNLTKAERGGLSELDKAGFIKRQLVETRQITKHVAQILDSRMNTKYDENDKLIREVKVITLKSKLVSDFRKDFQFYKVREINNYHHAHDAYLNAVVGTALIKKYPKLESEFVYGDYKVYDVRKMIAKSEQEIGKATAKYFFYSNIMNFFKTEITLANGEIRKRPLIETNGETGEIVWDKGRDFATVRKVLSMPQVNIVKKTEVQTGGFSKESILPKRNSDKLIARKKDWDPKKYGGFDSPTVAYSVLVVAKVEKGKSKKLKSVKELLGITIMERSSFEKNPIDFLEAKGYKEVKKDLIIKLPKYSLFELENGRKRMLASAGELQKGNELALPSKYVNFLYLASHYEKLKGSPEDNEQKQLFVEQHKHYLDEIIEQISEFSKRVILADANLDKVLSAYNKHRDKPIREQAENIIHLFTLTNLGAPAAFKYFDTTIDRKRYTSTKEVLDATLIHQSITGLYETRIDLSQLGGDSGGSSGGSKRTADGSEFESPKKKRKVSGGSSGGSTLNIEDEYRLHETSKEPDVSLGSTWLSDFPQAWAETGGMGLAVRQAPLIIPLKATSTPVSIKQYPMSQEARLGIKPHIQRLLDQGILVPCQSPWNTPLLPVKKPGTNDYRPVQDLREVNKRVEDIHPTVPNPYNLLSGLPPSHQWYTVLDLKDAFFCLRLHPTSQPLFAFEWRDPEMGISGQLTWTRLPQGFKNSPTLFNEALHRDLADFRIQHPDLILLQYVDDLLLAATSELDCQQGTRALLQTLGNLGYRASAKKAQICQKQVKYLGYLLKEGQRWLTEARKETVMGQPTPKTPRQLREFLGKAGFCRLFIPGFAEMAAPLYPLTKPGTLFNWGPDQQKAYQEIKQALLTAPALGLPDLTKPFELFVDEKQGYAKGVLTQKLGPWRRPVAYLSKKLDPVAAGWPPCLRMVAAIAVLTKDAGKLTMGQPLVILAPHAVEALVKQPPDRWLSNARMTHYQALLLDTDRVQFGPVVALNPATLLPLPEEGLQHNCLDILAEAHGTRPDLTDQPLPDADHTWYTDGSSLLQEGQRKAGAAVTTETEVIWAKALPAGTSAQRAELIALTQALKMAEGKKLNVYTDSRYAFATAHIHGEIYRRRGWLTSEGKEIKNKDEILALLKALFLPKRLSIIHCPGHQKGHSAEARGNRMADQAARKAAITETPDTSTLLIENSSPSGGSKRTADGSEFESPKKKRKVGSGPAAKRVKLD

SEQ ID NO: 3623 - protein, 1367 aa, synthetic construct
DKKYSIGLDIGTNSVGWAVITDEYKVPSKKFKVLGNTDRHSIKKNLIGALLFDSGETAEATRLKRTARRRYTRRKNRICYLQEIFSNEMAKVDDSFFHRLEESFLVEEDKKHERHPIFGNIVDEVAYHEKYPTIYHLRKKLVDSTDKADLRLIYLALAHMIKFRGHFLIEGDLNPDNSDVDKLFIQLVQTYNQLFEENPINASGVDAKAILSARLSKSRKLENLIAQLPGEKKNGLFGNLIALSLGLTPNFKSNFDLAEDAKLQLSKDTYDDDLDNLLAQIGDQYADLFLAAKNLSDAILLSDILRVNTEITKAPLSASMIKRYDEHHQDLTLLKALVRQQLPEKYKEIFFDQSKNGYAGYIDGGASQEEFYKFIKPILEKMDGTEELLVKLKREDLLRKQRTFDNGSIPHQIHLGELHAILRRQEDFYPFLKDNREKIEKILTFRIPYYVGPLARGNSRFAWMTRKSEETITPWNFEEVVDKGASAQSFIERMTNFDKNLPNEKVLPKHSLLYEYFTVYNELTKVKYVTEGMRKPAFLSGEQKKAIVDLLFKTNRKVTVKQLKEDYFKKIECFDSVEISGVEDRFNASLGTYHDLLKIIKDKDFLDNEENEDILEDIVLTLTLFEDREMIEERLKTYAHLFDDKVMKQLKRRRYTGWGRLSRKLINGIRDKQSGKTILDFLKSDGFANRNFMQLIHDDSLTFKEDIQKAQVSGQGDSLHEHIANLAGSPAIKKGILQTVKVVDELVKVMGRHKPENIVIEMARENQTTQKGQKNSRERMKRIEEGIKELGSQILKEHPVENTQLQNEKLYLYYLQNGRDMYVDQELDINRLSDYDVDAIVPQSFLKDDSIDNKVLTRSDKNRGKSDNVPSEEVVKKMKNYWRQLLNAKLITQRKFDNLTKAERGGLSELDKAGFIKRQLVETRQITKHVAQILDSRMNTKYDENDKLIREVKVITLKSKLVSDFRKDFQFYKVREINNYHHAHDAYLNAVVGTALIKKYPKLESEFVYGDYKVYDVRKMIAKSEQEIGKATAKYFFYSNIMNFFKTEITLANGEIRKRPLIETNGETGEIVWDKGRDFATVRKVLSMPQVNIVKKTEVQTGGFSKESILPKRNSDKLIARKKDWDPKKYGGFDSPTVAYSVLVVAKVEKGKSKKLKSVKELLGITIMERSSFEKNPIDFLEAKGYKEVKKDLIIKLPKYSLFELENGRKRMLASAGELQKGNELALPSKYVNFLYLASHYEKLKGSPEDNEQKQLFVEQHKHYLDEIIEQISEFSKRVILADANLDKVLSAYNKHRDKPIREQAENIIHLFTLTNLGAPAAFKYFDTTIDRKRYTSTKEVLDATLIHQSITGLYETRIDLSQLGGD

SEQ ID NO: 3624 - protein, 34 aa, synthetic construct
SGGSSGGSKRTADGSEFESPKKKRKVSGGSSGGS

SEQ ID NO: 3625 - protein, 22 aa, synthetic construct
SGGSKRTADGSEFESPKKKRKV

SEQ ID NO: 3626 - protein, 12 aa, synthetic construct
GSGPAAKRVKLD

SEQ ID NO: 3627 - protein, 150 aa, synthetic construct
  SITE 1..150: note = This sequence may encompass 1-30 GGGGS repeats
GGGGSGGGGSGGGGSGGGGSGGGGSGGGGSGGGGSGGGGSGGGGSGGGGSGGGGSGGGGSGGGGSGGGGSGGGGSGGGGSGGGGSGGGGSGGGGSGGGGSGGGGSGGGGSGGGGSGGGGSGGGGSGGGGSGGGGSGGGGSGGGGSGGGGS

SEQ ID NO: 3628 - protein, 30 aa, synthetic construct
  SITE 1..30: note = This sequence may encompass 1-30 residues
GGGGGGGGGGGGGGGGGGGGGGGGGGGGGG

SEQ ID NO: 3629 - protein, 150 aa, synthetic construct
  SITE 1..150: note = This sequence may encompass 1-30 EAAAK repeats
EAAAKEAAAKEAAAKEAAAKEAAAKEAAAKEAAAKEAAAKEAAAKEAAAKEAAAKEAAAKEAAAKEAAAKEAAAKEAAAKEAAAKEAAAKEAAAKEAAAKEAAAKEAAAKEAAAKEAAAKEAAAKEAAAKEAAAKEAAAKEAAAKEAAAK

SEQ ID NO: 3630 - protein, 90 aa, synthetic construct
  SITE 1..90: note = This sequence may encompass 1-30 GGS repeats
GGSGGSGGSGGSGGSGGSGGSGGSGGSGGSGGSGGSGGSGGSGGSGGSGGSGGSGGSGGSGGSGGSGGSGGSGGSGGSGGSGGSGGSGGS

SEQ ID NO: 3631 - protein, 120 aa, synthetic construct
  SITE 1..120: note = This sequence may encompass 1-30 SGGS repeats
SGGSSGGSSGGSSGGSSGGSSGGSSGGSSGGSSGGSSGGSSGGSSGGSSGGSSGGSSGGSSGGSSGGSSGGSSGGSSGGSSGGSSGGSSGGSSGGSSGGSSGGSSGGSSGGSSGGSSGGS

SEQ ID NO: 3632 - protein, 60 aa, synthetic construct
  SITE 1..60: note = This sequence may encompass 1-30 XP repeats
XPXPXPXPXPXPXPXPXPXPXPXPXPXPXPXPXPXPXPXPXPXPXPXPXPXPXPXPXPXP

SEQ ID NO: 3633 - protein, 16 aa, synthetic construct
SGSETPGTSESATPES

SEQ ID NO: 3634 - protein, 32 aa, synthetic construct
SGGSSGGSSGSETPGTSESATPESSGGSSGGS

SEQ ID NO: 3635 - protein, 33 aa, synthetic construct
SGGSSGGSSGSETPGTSESATPESSGGSSGGSS

SEQ ID NO: 3636 - protein, 10 aa, synthetic construct
SGGSGGSGGS

SEQ ID NO: 3637 - protein, 4 aa, synthetic construct
SGGS

SEQ ID NO: 3638 - protein, 60 aa, synthetic construct
SGGSSGGSSGSETPGTSESATPESAGSYPYDVPDYAGSAAPAAKKKKLDGSGSGGSSGGS

SEQ ID NO: 3639 - protein, 6 aa, synthetic construct
GGSGGS

SEQ ID NO: 3640 - protein, 9 aa, synthetic construct
GGSGGSGGS

SEQ ID NO: 3641 - RNA, 76 nt, synthetic construct
  source 1..76: mol_type = other RNA
gttttagagctagaaatagcaagttaaaataaggctagtccgttatcaacttgaaaaagtggcaccgagtcggtgc

SEQ ID NO: 3642 - RNA, 76 nt, synthetic construct
  source 1..76: mol_type = other RNA
gtttgagagctagaaatagcaagtttaaataaggctagtccgttatcaacttgaaaaagtgggaccgagtcggtcc

SEQ ID NO: 3643 - RNA, 86 nt, synthetic construct
  source 1..86: mol_type = other RNA
gtttaagagctatgctggaaacagcatagcaagtttaaataaggctagtccgttatcaacttgaaaaagtggcaccgagtcggtgc

SEQ ID NO: 3644 - RNA, 76 nt, synthetic construct
  source 1..76: mol_type = other RNA
gttttagtactctggaaacagaatctactaaaacaaggcaaaatgccgtgtttatctcgtcaacttgttggcgaga

SEQ ID NO: 3645 - RNA, 76 nt, synthetic construct
  source 1..76: mol_type = other RNA
gttttagtactctggaaacagaatctactgaaacaagacaatatgtcgtgtttatcccatcaatttattggtggga

SEQ ID NO: 3646 - RNA, 67 nt, synthetic construct
  source 1..67: mol_type = other RNA
agagctagaaatagcaagttaaaataaggctagtccgttatcaacttgaaaaagtggcaccgagtcg

SEQ ID NO: 3647 - RNA, 40 nt, synthetic construct
  source 1..40: mol_type = other RNA
tttgcgaaccaacgataggtgggggtgcgtggaggatgga

SEQ ID NO: 3648 - RNA, 40 nt, synthetic construct
  source 1..40: mol_type = other RNA
catgcacaagaaagctttgcactttgcgaaccaacgatag

SEQ ID NO: 3649 - RNA, 40 nt, synthetic construct
  source 1..40: mol_type = other RNA
ggcgtcatgcacaagaaagctttgcactttgcgaaccaac

SEQ ID NO: 3650 - RNA, 40 nt, synthetic construct
  source 1..40: mol_type = other RNA
ccgagtaagcaggcagagatcgcgccagacgctccccaga

SEQ ID NO: 3651 - RNA, 40 nt, synthetic construct
  source 1..40: mol_type = other RNA
cccgaaaaagcgggtttggcaaaagcaaatttcccgagta

SEQ ID NO: 3652 - RNA, 40 nt, synthetic construct
  source 1..40: mol_type = other RNA
cgcaagtgaggaggggggcgcgggatccccgaaaaagcgg

SEQ ID NO: 3653 - RNA, 40 nt, synthetic construct
  source 1..40: mol_type = other RNA
agcagcgcaagtgaggaggggggcgcgggatccccgaaaa

SEQ ID NO: 3654 - RNA, 40 nt, synthetic construct
  source 1..40: mol_type = other RNA
gcggagccggctggggctccgagagcagcgcaagtgagga

SEQ ID NO: 3655 - RNA, 40 nt, synthetic construct
  source 1..40: mol_type = other RNA
ggtcaataaatatccaaaccgccgaagcgggcggagccgg

SEQ ID NO: 3656 - RNA, 40 nt, synthetic construct
  source 1..40: mol_type = other RNA
gcgagtcggaggacgaggtcaataaatatccaaaccgccg

SEQ ID NO: 3657 - RNA, 40 nt, synthetic construct
  source 1..40: mol_type = other RNA
gggttgttgggggtcctgtagcctgtcagcgagtcggagg

SEQ ID NO: 3658 - RNA, 40 nt, synthetic construct
  source 1..40: mol_type = other RNA
cgtggattggggttgttgggggtcctgtagcctgtcagcg

SEQ ID NO: 3659 - RNA, 40 nt, synthetic construct
  source 1..40: mol_type = other RNA
ttcccaggcctgcagtttgcccatccacgtcagggcctca

SEQ ID NO: 3660 - RNA, 40 nt, synthetic construct
  source 1..40: mol_type = other RNA
ggcttgctgccttcccaggcctgcagtttgcccatccacg

SEQ ID NO: 3661 - RNA, 40 nt, synthetic construct
  source 1..40: mol_type = other RNA
gcgtggaggatggaacacggacggcccggcttgctgcctt

SEQ ID NO: 3662 - RNA, 40 nt, synthetic construct
  source 1..40: mol_type = other RNA
caacgataggtgggggtgcgtggaggatggaacacggacg

SEQ ID NO: 3663 - RNA, 40 nt, synthetic construct
  source 1..40: mol_type = other RNA
cgaaccaacgataggtgggggtgcgtggaggatggaacac

SEQ ID NO: 3664 - RNA, 40 nt, synthetic construct
  source 1..40: mol_type = other RNA
gagccgcccgcgctccctgaaccctagaactgtcttcgac

SEQ ID NO: 3665 - RNA, 40 nt, synthetic construct
  source 1..40: mol_type = other RNA
aactgtcttcgactccggggccccgttggaagactgagtg

SEQ ID NO: 3666 - RNA, 40 nt, synthetic construct
  source 1..40: mol_type = other RNA
cttcgactccggggccccgttggaagactgagtgcccggg

SEQ ID NO: 3667 - RNA, 40 nt, synthetic construct
  source 1..40: mol_type = other RNA
gaagccgcgcccaccgcctgccagttcacaaccgctccga

SEQ ID NO: 3668 - RNA, 40 nt, synthetic construct
  source 1..40: mol_type = other RNA
cgctccgagcgtgggtctccgcccagctccagtcctgtga

SEQ ID NO: 3669 - RNA, 40 nt, synthetic construct
  source 1..40: mol_type = other RNA
tgtgatccgggcccgccccctagcggccggggagggaggg

SEQ ID NO: 3670 - RNA, 40 nt, synthetic construct
  source 1..40: mol_type = other RNA
ggggagggaggggccgggtccgcggccggcgaacggggct

SEQ ID NO: 3671 - RNA, 40 nt, synthetic construct
  source 1..40: mol_type = other RNA
tggtggcccacgccggccaactcaccgcagtctggcgccg

SEQ ID NO: 3672 - RNA, 40 nt, synthetic construct
  source 1..40: mol_type = other RNA
cgctccctgaaccctagaactgtcttcgactccggggccc

SEQ ID NO: 3673 - RNA, 40 nt, synthetic construct
  source 1..40: mol_type = other RNA
cgcccagctccagtcctgtgatccgggcccgccccctagc

SEQ ID NO: 3674 - RNA, 40 nt, synthetic construct
  source 1..40: mol_type = other RNA
cagtcctgtgatccgggcccgccccctagcggccggggag

SEQ ID NO: 3675 - RNA, 40 nt, synthetic construct
  source 1..40: mol_type = other RNA
cccgccccctagcggccggggagggaggggccgggtccgc

SEQ ID NO: 3676 - RNA, 40 nt, synthetic construct
  source 1..40: mol_type = other RNA
tagcggccggggagggaggggccgggtccgcggccggcga

SEQ ID NO: 3677 - RNA, 40 nt, synthetic construct
  source 1..40: mol_type = other RNA
cgggtccgcggccggcgaacggggctcgaagggtccttgt

SEQ ID NO: 3678 - RNA, 40 nt, synthetic construct
  source 1..40: mol_type = other RNA
gggagggaggggccgggtccgcggccggcgaacggggctc

SEQ ID NO: 3679 - RNA, 40 nt, synthetic construct
  source 1..40: mol_type = other RNA
actgtcttcgactccggggccccgttggaagactgagtgc

SEQ ID NO: 3680 - RNA, 40 nt, synthetic construct
  source 1..40: mol_type = other RNA
agccgcccgcgctccctgaaccctagaactgtcttcgact

SEQ ID NO: 3681 - RNA, 40 nt, synthetic construct
  source 1..40: mol_type = other RNA
tctccgcccagctccagtcctgtgatccgggcccgccccc

SEQ ID NO: 3682 - RNA, 40 nt, synthetic construct; identical to SEQ ID NO: 3678
  source 1..40: mol_type = other RNA

SEQ ID NO: 3683 - RNA, 138 nt, synthetic construct
  source 1..138: mol_type = other RNA
gttggaagactgagtgcccggttttagagctagaaatagcaagttaaaataaggctagtccgttatcaacttgaaaaagtggcaccgagtcggtgcaacgataggtgggggtgcgtggaggatggagcactcagtctt

SEQ ID NO: 3684 - RNA, 137 nt, synthetic construct
  source 1..137: mol_type = other RNA
gttggaagactgagtgcccggttttagagctagaaatagcaagttaaaataaggctagtccgttatcaacttgaaaaagtggcaccgagtcggtgcaacgataggtgggggtgcgtggaggatggagcactcagtct

SEQ ID NO: 3685 - RNA, 136 nt, synthetic construct
  source 1..136: mol_type = other RNA
gttggaagactgagtgcccggttttagagctagaaatagcaagttaaaataaggctagtccgttatcaacttgaaaaagtggcaccgagtcggtgcaacgataggtgggggtgcgtggaggatggagcactcagtc

SEQ ID NO: 3686 - RNA, 135 nt, synthetic construct
  source 1..135: mol_type = other RNA
gttggaagactgagtgcccggttttagagctagaaatagcaagttaaaataaggctagtccgttatcaacttgaaaaagtggcaccgagtcggtgcaacgataggtgggggtgcgtggaggatggagcactcagt

SEQ ID NO: 3687 - RNA, 134 nt, synthetic construct
  source 1..134: mol_type = other RNA
gttggaagactgagtgcccggttttagagctagaaatagcaagttaaaataaggctagtccgttatcaacttgaaaaagtggcaccgagtcggtgcaacgataggtgggggtgcgtggaggatggagcactcag

SEQ ID NO: 3688 - RNA, 138 nt, synthetic construct
  source 1..138: mol_type = other RNA
gttggaagactgagtgcccggttttagagctagaaatagcaagttaaaataaggctagtccgttatcaacttgaaaaagtggcaccgagtcggtgcaggcagagatcgcgccagacgctccccagagcactcagtctt

SEQ ID NO: 3689 - RNA, 137 nt, synthetic construct
  source 1..137: mol_type = other RNA
gttggaagactgagtgcccggttttagagctagaaatagcaagttaaaataaggctagtccgttatcaacttgaaaaagtggcaccgagtcggtgcaggcagagatcgcgccagacgctccccagagcactcagtct

SEQ ID NO: 3690 - RNA, 136 nt, synthetic construct
  source 1..136: mol_type = other RNA
gttggaagactgagtgcccggttttagagctagaaatagcaagttaaaataaggctagtccgttatcaacttgaaaaagtggcaccgagtcggtgcaggcagagatcgcgccagacgctccccagagcactcagtc

SEQ ID NO: 3691 - RNA, 135 nt, synthetic construct
  source 1..135: mol_type = other RNA
gttggaagactgagtgcccggttttagagctagaaatagcaagttaaaataaggctagtccgttatcaacttgaaaaagtggcaccgagtcggtgcaggcagagatcgcgccagacgctccccagagcactcagt

SEQ ID NO: 3692 - RNA, 134 nt, synthetic construct
  source 1..134: mol_type = other RNA
gttggaagactgagtgcccggttttagagctagaaatagcaagttaaaataaggctagtccgttatcaacttgaaaaagtggcaccgagtcggtgcaggcagagatcgcgccagacgctccccagagcactcag

SEQ ID NO: 3693 - RNA, 138 nt, synthetic construct
  source 1..138: mol_type = other RNA
gttggaagactgagtgcccggttttagagctagaaatagcaagttaaaataaggctagtccgttatcaacttgaaaaagtggcaccgagtcggtgctatccaaaccgccgaagcgggcggagccgggcactcagtctt

SEQ ID NO: 3694 - RNA, 137 nt, synthetic construct
  source 1..137: mol_type = other RNA
gttggaagactgagtgcccggttttagagctagaaatagcaagttaaaataaggctagtccgttatcaacttgaaaaagtggcaccgagtcggtgctatccaaaccgccgaagcgggcggagccgggcactcagtct

SEQ ID NO: 3695 - RNA, 136 nt, synthetic construct
  source 1..136: mol_type = other RNA
gttggaagactgagtgcccggttttagagctagaaatagcaagttaaaataaggctagtccgttatcaacttgaaaaagtggcaccgagtcggtgctatccaaaccgccgaagcgggcggagccgggcactcagtc

SEQ ID NO: 3696 - RNA, 135 nt, synthetic construct
  source 1..135: mol_type = other RNA
gttggaagactgagtgcccggttttagagctagaaatagcaagttaaaataaggctagtccgttatcaacttgaaaaagtggcaccgagtcggtgctatccaaaccgccgaagcgggcggagccgggcactcagt

SEQ ID NO: 3697 - RNA, 134 nt, synthetic construct
  source 1..134: mol_type = other RNA
gttggaagactgagtgcccggttttagagctagaaatagcaagttaaaataaggctagtccgttatcaacttgaaaaagtggcaccgagtcggtgctatccaaaccgccgaagcgggcggagccgggcactcag

SEQ ID NO: 3698 - RNA, 138 nt, synthetic construct
  source 1..138: mol_type = other RNA
cgttggaagactgagtgcccgttttagagctagaaatagcaagttaaaataaggctagtccgttatcaacttgaaaaagtggcaccgagtcggtgcaacgataggtgggggtgcgtggaggatggacactcagtcttc

SEQ ID NO: 3699 - RNA, 137 nt, synthetic construct
  source 1..137: mol_type = other RNA
cgttggaagactgagtgcccgttttagagctagaaatagcaagttaaaataaggctagtccgttatcaacttgaaaaagtggcaccgagtcggtgcaacgataggtgggggtgcgtggaggatggacactcagtctt

SEQ ID NO: 3700 - RNA, 136 nt, synthetic construct
  source 1..136: mol_type = other RNA
cgttggaagactgagtgcccgttttagagctagaaatagcaagttaaaataaggctagtccgttatcaacttgaaaaagtggcaccgagtcggtgcaacgataggtgggggtgcgtggaggatggacactcagtct

SEQ ID NO: 3701 - RNA, 135 nt, synthetic construct
  source 1..135: mol_type = other RNA
cgttggaagactgagtgcccgttttagagctagaaatagcaagttaaaataaggctagtccgttatcaacttgaaaaagtggcaccgagtcggtgcaacgataggtgggggtgcgtggaggatggacactcagtc

SEQ ID NO: 3702 - RNA, 134 nt, synthetic construct
  source 1..134: mol_type = other RNA
cgttggaagactgagtgcccgttttagagctagaaatagcaagttaaaataaggctagtccgttatcaacttgaaaaagtggcaccgagtcggtgcaacgataggtgggggtgcgtggaggatggacactcagt

SEQ ID NO: 3703 - RNA, 138 nt, synthetic construct
  source 1..138: mol_type = other RNA
cgttggaagactgagtgcccgttttagagctagaaatagcaagttaaaataaggctagtccgttatcaacttgaaaaagtggcaccgagtcggtgcaggcagagatcgcgccagacgctccccagacactcagtcttc

SEQ ID NO: 3704 - RNA, 137 nt, synthetic construct
  source 1..137: mol_type = other RNA
cgttggaagactgagtgcccgttttagagctagaaatagcaagttaaaataaggctagtccgttatcaacttgaaaaagtggcaccgagtcggtgcaggcagagatcgcgccagacgctccccagacactcagtctt

SEQ ID NO: 3705 - RNA, 136 nt, synthetic construct
  source 1..136: mol_type = other RNA
cgttggaagactgagtgcccgttttagagctagaaatagcaagttaaaataaggctagtccgttatcaacttgaaaaagtggcaccgagtcggtgcaggcagagatcgcgccagacgctccccagacactcagtct

SEQ ID NO: 3706 - RNA, 135 nt, synthetic construct
  source 1..135: mol_type = other RNA
cgttggaagactgagtgcccgttttagagctagaaatagcaagttaaaataaggctagtccgttatcaacttgaaaaagtggcaccgagtcggtgcaggcagagatcgcgccagacgctccccagacactcagtc

SEQ ID NO: 3707 - RNA, 134 nt, synthetic construct
  source 1..134: mol_type = other RNA
cgttggaagactgagtgcccgttttagagctagaaatagcaagttaaaataaggctagtccgttatcaacttgaaaaagtggcaccgagtcggtgcaggcagagatcgcgccagacgctccccagacactcagt

SEQ ID NO: 3708 - RNA, 138 nt, synthetic construct
  source 1..138: mol_type = other RNA
cgttggaagactgagtgcccgttttagagctagaaatagcaagttaaaataaggctagtccgttatcaacttgaaaaagtggcaccgagtcggtgctatccaaaccgccgaagcgggcggagccggcactcagtcttc

SEQ ID NO: 3709 - RNA, 137 nt, synthetic construct
  source 1..137: mol_type = other RNA
cgttggaagactgagtgcccgttttagagctagaaatagcaagttaaaataaggctagtccgttatcaacttgaaaaagtggcaccgagtcggtgctatccaaaccgccgaagcgggcggagccggcactcagtctt

SEQ ID NO: 3710 - RNA, 136 nt, synthetic construct
  source 1..136: mol_type = other RNA
cgttggaagactgagtgcccgttttagagctagaaatagcaagttaaaataaggctagtccgttatcaacttgaaaaagtggcaccgagtcggtgctatccaaaccgccgaagcgggcggagccggcactcagtct

SEQ ID NO: 3711 - RNA, 135 nt, synthetic construct
  source 1..135: mol_type = other RNA
cgttggaagactgagtgcccgttttagagctagaaatagcaagttaaaataaggctagtccgttatcaacttgaaaaagtggcaccgagtcggtgctatccaaaccgccgaagcgggcggagccggcactcagtc

SEQ ID NO: 3712 - RNA, 134 nt, synthetic construct
  source 1..134: mol_type = other RNA
cgttggaagactgagtgcccgttttagagctagaaatagcaagttaaaataaggctagtccgttatcaacttgaaaaagtggcaccgagtcggtgctatccaaaccgccgaagcgggcggagccggcactcagt

SEQ ID NO: 3713 - RNA, 138 nt, synthetic construct
  source 1..138: mol_type = other RNA
gggtccgcggccggcgaacggttttagagctagaaatagcaagttaaaataaggctagtccgttatcaacttgaaaaagtggcaccgagtcggtgcaacgataggtgggggtgcgtggaggatggatcgccggccgcg

SEQ ID NO: 3714 - RNA, 137 nt, synthetic construct
  source 1..137: mol_type = other RNA
gggtccgcggccggcgaacggttttagagctagaaatagcaagttaaaataaggctagtccgttatcaacttgaaaaagtggcaccgagtcggtgcaacgataggtgggggtgcgtggaggatggatcgccggccgc

SEQ ID NO: 3715 - RNA, 136 nt, synthetic construct
  source 1..136: mol_type = other RNA
gggtccgcggccggcgaacggttttagagctagaaatagcaagttaaaataaggctagtccgttatcaacttgaaaaagtggcaccgagtcggtgcaacgataggtgggggtgcgtggaggatggatcgccggccg

SEQ ID NO: 3716 - RNA, 135 nt, synthetic construct
  source 1..135: mol_type = other RNA
gggtccgcggccggcgaacggttttagagctagaaatagcaagttaaaataaggctagtccgttatcaacttgaaaaagtggcaccgagtcggtgcaacgataggtgggggtgcgtggaggatggatcgccggcc

SEQ ID NO: 3717 - RNA, 134 nt, synthetic construct
  source 1..134: mol_type = other RNA
gggtccgcggccggcgaacggttttagagctagaaatagcaagttaaaataaggctagtccgttatcaacttgaaaaagtggcaccgagtcggtgcaacgataggtgggggtgcgtggaggatggatcgccggc

SEQ ID NO: 3718 - RNA, 138 nt, synthetic construct
  source 1..138: mol_type = other RNA
gggtccgcggccggcgaacggttttagagctagaaatagcaagttaaaataaggctagtccgttatcaacttgaaaaagtggcaccgagtcggtgcaggcagagatcgcgccagacgctccccagatcgccggccgcg

SEQ ID NO: 3719 - RNA, 137 nt, synthetic construct
  source 1..137: mol_type = other RNA
gggtccgcggccggcgaacggttttagagctagaaatagcaagttaaaataaggctagtccgttatcaacttgaaaaagtggcaccgagtcggtgcaggcagagatcgcgccagacgctccccagatcgccggccgc

SEQ ID NO: 3720 - RNA, 136 nt, synthetic construct
  source 1..136: mol_type = other RNA
gggtccgcggccggcgaacggttttagagctagaaatagcaagttaaaataaggctagtccgttatcaacttgaaaaagtggcaccgagtcggtgcaggcagagatcgcgccagacgctccccagatcgccggccg

SEQ ID NO: 3721 - RNA, 135 nt, synthetic construct
  source 1..135: mol_type = other RNA
gggtccgcggccggcgaacggttttagagctagaaatagcaagttaaaataaggctagtccgttatcaacttgaaaaagtggcaccgagtcggtgcaggcagagatcgcgccagacgctccccagatcgccggcc

SEQ ID NO: 3722 - RNA, 134 nt, synthetic construct
  source 1..134: mol_type = other RNA
gggtccgcggccggcgaacggttttagagctagaaatagcaagttaaaataaggctagtccgttatcaacttgaaaaagtggcaccgagtcggtgcaggcagagatcgcgccagacgctccccagatcgccggc

SEQ ID NO: 3723 - RNA, 138 nt, synthetic construct
  source 1..138: mol_type = other RNA
gggtccgcggccggcgaacggttttagagctagaaatagcaagttaaaataaggctagtccgttatcaacttgaaaaagtggcaccgagtcggtgctatccaaaccgccgaagcgggcggagccggtcgccggccgcg

SEQ ID NO: 3724 - RNA, 137 nt, synthetic construct
  source 1..137: mol_type = other RNA
gggtccgcggccggcgaacggttttagagctagaaatagcaagttaaaataaggctagtccgttatcaacttgaaaaagtggcaccgagtcggtgctatccaaaccgccgaagcgggcggagccggtcgccggccgc

SEQ ID NO: 3725 - RNA, 136 nt, synthetic construct
  source 1..136: mol_type = other RNA
gggtccgcggccggcgaacggttttagagctagaaatagcaagttaaaataaggctagtccgttatcaacttgaaaaagtggcaccgagtcggtgctatccaaaccgccgaagcgggcggagccggtcgccggccg

SEQ ID NO: 3726 - RNA, 135 nt, synthetic construct
  source 1..135: mol_type = other RNA
gggtccgcggccggcgaacggttttagagctagaaatagcaagttaaaataaggctagtccgttatcaacttgaaaaagtggcaccgagtcggtgctatccaaaccgccgaagcgggcggagccggtcgccggcc

SEQ ID NO: 3727 - RNA, 134 nt, synthetic construct
  source 1..134: mol_type = other RNA
gggtccgcggccggcgaacggttttagagctagaaatagcaagttaaaataaggctagtccgttatcaacttgaaaaagtggcaccgagtcggtgctatccaaaccgccgaagcgggcggagccggtcgccggc

SEQ ID NO: 3728 - RNA, 138 nt, synthetic construct
  source 1..138: mol_type = other RNA
ggtgcgtggaggatggaacagttttagagctagaaatagcaagttaaaataaggctagtccgttatcaacttgaaaaagtggcaccgagtcggtgcggagggaggggccgggtccgcggccggcgatccatcctccac

SEQ ID NO: 3729 - RNA, 137 nt, synthetic construct
  source 1..137: mol_type = other RNA
ggtgcgtggaggatggaacagttttagagctagaaatagcaagttaaaataaggctagtccgttatcaacttgaaaaagtggcaccgagtcggtgcggagggaggggccgggtccgcggccggcgatccatcctcca

SEQ ID NO: 3730 - RNA, 136 nt, synthetic construct
  source 1..136: mol_type = other RNA
ggtgcgtggaggatggaacagttttagagctagaaatagcaagttaaaataaggctagtccgttatcaacttgaaaaagtggcaccgagtcggtgcggagggaggggccgggtccgcggccggcgatccatcctcc

SEQ ID NO: 3731 - RNA, 135 nt, synthetic construct
  source 1..135: mol_type = other RNA
ggtgcgtggaggatggaacagttttagagctagaaatagcaagttaaaataaggctagtccgttatcaacttgaaaaagtggcaccgagtcggtgcggagggaggggccgggtccgcggccggcgatccatcctc

SEQ ID NO: 3732 - RNA, 134 nt, synthetic construct
  source 1..134: mol_type = other RNA
ggtgcgtggaggatggaacagttttagagctagaaatagcaagttaaaataaggctagtccgttatcaacttgaaaaagtggcaccgagtcggtgcggagggaggggccgggtccgcggccggcgatccatcct

SEQ ID NO: 3733 - RNA, 138 nt, synthetic construct
  source 1..138: mol_type = other RNA
ggtgcgtggaggatggaacagttttagagctagaaatagcaagttaaaataaggctagtccgttatcaacttgaaaaagtggcaccgagtcggtgcactccggggccccgttggaagactgagtgctccatcctccac

SEQ ID NO: 3734 - RNA, 137 nt, synthetic construct
  source 1..137: mol_type = other RNA
ggtgcgtggaggatggaacagttttagagctagaaatagcaagttaaaataaggctagtccgttatcaacttgaaaaagtggcaccgagtcggtgcactccggggccccgttggaagactgagtgctccatcctcca

SEQ ID NO: 3735 - RNA, 136 nt, synthetic construct
  source 1..136: mol_type = other RNA
ggtgcgtggaggatggaacagttttagagctagaaatagcaagttaaaataaggctagtccgttatcaacttgaaaaagtggcaccgagtcggtgcactccggggccccgttggaagactgagtgctccatcctcc

SEQ ID NO: 3736 - RNA, 135 nt, synthetic construct
  source 1..135: mol_type = other RNA
ggtgcgtggaggatggaacagttttagagctagaaatagcaagttaaaataaggctagtccgttatcaacttgaaaaagtggcaccgagtcggtgcactccggggccccgttggaagactgagtgctccatcctc

SEQ ID NO: 3737 - RNA, 134 nt, synthetic construct
  source 1..134: mol_type = other RNA
ggtgcgtggaggatggaacagttttagagctagaaatagcaagttaaaataaggctagtccgttatcaacttgaaaaagtggcaccgagtcggtgcactccggggccccgttggaagactgagtgctccatcct

SEQ ID NO: 3738 - RNA, 138 nt, synthetic construct
  source 1..138: mol_type = other RNA
ggtgcgtggaggatggaacagttttagagctagaaatagcaagttaaaataaggctagtccgttatcaacttgaaaaagtggcaccgagtcggtgcgactccggggccccgttggaagactgagtgtccatcctccac

SEQ ID NO: 3739 - RNA, 137 nt, synthetic construct
  source 1..137: mol_type = other RNA
ggtgcgtggaggatggaacagttttagagctagaaatagcaagttaaaataaggctagtccgttatcaacttgaaaaagtggcaccgagtcggtgcgactccggggccccgttggaagactgagtgtccatcctcca

SEQ ID NO: 3740 - RNA, 136 nt, synthetic construct
  source 1..136: mol_type = other RNA
ggtgcgtggaggatggaacagttttagagctagaaatagcaagttaaaataaggctagtccgttatcaacttgaaaaagtggcaccgagtcggtgcgactccggggccccgttggaagactgagtgtccatcctcc

SEQ ID NO: 3741 - RNA, 135 nt, synthetic construct
  source 1..135: mol_type = other RNA
ggtgcgtggaggatggaacagttttagagctagaaatagcaagttaaaataaggctagtccgttatcaacttgaaaaagtggcaccgagtcggtgcgactccggggccccgttggaagactgagtgtccatcctc

SEQ ID NO: 3742 - RNA, 134 nt, synthetic construct
  source 1..134: mol_type = other RNA
ggtgcgtggaggatggaacagttttagagctagaaatagcaagttaaaataaggctagtccgttatcaacttgaaaaagtggcaccgagtcggtgcgactccggggccccgttggaagactgagtgtccatcct

SEQ ID NO: 3743 - RNA, 138 nt, synthetic construct
  source 1..138: mol_type = other RNA
gccagacgctccccagagcagttttagagctagaaatagcaagttaaaataaggctagtccgttatcaacttgaaaaagtggcaccgagtcggtgcggagggaggggccgggtccgcggccggcgatctggggagcgt

SEQ ID NO: 3744 - RNA, 137 nt, synthetic construct
  source 1..137: mol_type = other RNA
gccagacgctccccagagcagttttagagctagaaatagcaagttaaaataaggctagtccgttatcaacttgaaaaagtggcaccgagtcggtgcggagggaggggccgggtccgcggccggcgatctggggagcg

SEQ ID NO: 3745 - RNA, 136 nt, synthetic construct
  source 1..136: mol_type = other RNA
gccagacgctccccagagcagttttagagctagaaatagcaagttaaaataaggctagtccgttatcaacttgaaaaagtggcaccgagtcggtgcggagggaggggccgggtccgcggccggcgatctggggagc

SEQ ID NO: 3746 - RNA, 135 nt, synthetic construct
  source 1..135: mol_type = other RNA
gccagacgctccccagagcagttttagagctagaaatagcaagttaaaataaggctagtccgttatcaacttgaaaaagtggcaccgagtcggtgcggagggaggggccgggtccgcggccggcgatctggggag

SEQ ID NO: 3747 - RNA, 134 nt, synthetic construct
  source 1..134: mol_type = other RNA
gccagacgctccccagagcagttttagagctagaaatagcaagttaaaataaggctagtccgttatcaacttgaaaaagtggcaccgagtcggtgcggagggaggggccgggtccgcggccggcgatctgggga

SEQ ID NO: 3748 - RNA, 138 nt, synthetic construct
  source 1..138: mol_type = other RNA
gccagacgctccccagagcagttttagagctagaaatagcaagttaaaataaggctagtccgttatcaacttgaaaaagtggcaccgagtcggtgcactccggggccccgttggaagactgagtgctctggggagcgt

SEQ ID NO: 3749 - RNA, 137 nt, synthetic construct
  source 1..137: mol_type = other RNA
gccagacgctccccagagcagttttagagctagaaatagcaagttaaaataaggctagtccgttatcaacttgaaaaagtggcaccgagtcggtgcactccggggccccgttggaagactgagtgctctggggagcg

SEQ ID NO: 3750 - RNA, 136 nt, synthetic construct
  source 1..136: mol_type = other RNA
gccagacgctccccagagcagttttagagctagaaatagcaagttaaaataaggctagtccgttatcaacttgaaaaagtggcaccgagtcggtgcactccggggccccgttggaagactgagtgctctggggagc

SEQ ID NO: 3751 - RNA, 135 nt, synthetic construct
  source 1..135: mol_type = other RNA
gccagacgctccccagagcagttttagagctagaaatagcaagttaaaataaggctagtccgttatcaacttgaaaaagtggcaccgagtcggtgcactccggggccccgttggaagactgagtgctctggggag

SEQ ID NO: 3752 - RNA, 134 nt, synthetic construct
  source 1..134: mol_type = other RNA
gccagacgctccccagagcagttttagagctagaaatagcaagttaaaataaggctagtccgttatcaacttgaaaaagtggcaccgagtcggtgcactccggggccccgttggaagactgagtgctctgggga

SEQ ID NO: 3753 - RNA, 138 nt, synthetic construct
  source 1..138: mol_type = other RNA
gccagacgctccccagagcagttttagagctagaaatagcaagttaaaataaggctagtccgttatcaacttgaaaaagtggcaccgagtcggtgcgactccggggccccgttggaagactgagtgtctggggagcgt

SEQ ID NO: 3754 - RNA, 137 nt, synthetic construct
  source 1..137: mol_type = other RNA
gccagacgctccccagagcagttttagagctagaaatagcaagttaaaataaggctagtccgttatcaacttgaaaaagtggcaccgagtcggtgcgactccggggccccgttggaagactgagtgtctggggagcg

SEQ ID NO: 3755 - RNA, 136 nt, synthetic construct
  source 1..136: mol_type = other RNA
gccagacgctccccagagcagttttagagctagaaatagcaagttaaaataaggctagtccgttatcaacttgaaaaagtggcaccgagtcggtgcgactccggggccccgttggaagactgagtgtctggggagc

SEQ ID NO: 3756 - RNA, 135 nt, synthetic construct
  source 1..135: mol_type = other RNA
gccagacgctccccagagcagttttagagctagaaatagcaagttaaaataaggctagtccgttatcaacttgaaaaagtggcaccgagtcggtgcgactccggggccccgttggaagactgagtgtctggggag

SEQ ID NO: 3757 - RNA, 134 nt, synthetic construct
  source 1..134: mol_type = other RNA
gccagacgctccccagagcagttttagagctagaaatagcaagttaaaataaggctagtccgttatcaacttgaaaaagtggcaccgagtcggtgcgactccggggccccgttggaagactgagtgtctgggga

SEQ ID NO: 3758 - RNA, 138 nt, synthetic construct
  source 1..138: mol_type = other RNA
gaagcgggcggagccggctggttttagagctagaaatagcaagttaaaataaggctagtccgttatcaacttgaaaaagtggcaccgagtcggtgcggagggaggggccgggtccgcggccggcgaccggctccgccc

SEQ ID NO: 3759 - RNA, 137 nt, synthetic construct
  source 1..137: mol_type = other RNA
gaagcgggcggagccggctggttttagagctagaaatagcaagttaaaataaggctagtccgttatcaacttgaaaaagtggcaccgagtcggtgcggagggaggggccgggtccgcggccggcgaccggctccgcc

SEQ ID NO: 3760 - RNA, 136 nt, synthetic construct
  source 1..136: mol_type = other RNA
gaagcgggcggagccggctggttttagagctagaaatagcaagttaaaataaggctagtccgttatcaacttgaaaaagtggcaccgagtcggtgcggagggaggggccgggtccgcggccggcgaccggctccgc

SEQ ID NO: 3761 - RNA, 135 nt, synthetic construct
  source 1..135: mol_type = other RNA
gaagcgggcggagccggctggttttagagctagaaatagcaagttaaaataaggctagtccgttatcaacttgaaaaagtggcaccgagtcggtgcggagggaggggccgggtccgcggccggcgaccggctccg

SEQ ID NO: 3762 - RNA, 134 nt, synthetic construct
  source 1..134: mol_type = other RNA
gaagcgggcggagccggctggttttagagctagaaatagcaagttaaaataaggctagtccgttatcaacttgaaaaagtggcaccgagtcggtgcggagggaggggccgggtccgcggccggcgaccggctcc

SEQ ID NO: 3763 - RNA, 138 nt, synthetic construct
  source 1..138: mol_type = other RNA
gaagcgggcggagccggctggttttagagctagaaatagcaagttaaaataaggctagtccgttatcaacttgaaaaagtggcaccgagtcggtgcactccggggccccgttggaagactgagtgcccggctccgccc

SEQ ID NO: 3764 - RNA, 137 nt, synthetic construct
  source 1..137: mol_type = other RNA
gaagcgggcggagccggctggttttagagctagaaatagcaagttaaaataaggctagtccgttatcaacttgaaaaagtggcaccgagtcggtgcactccggggccccgttggaagactgagtgcccggctccgcc

SEQ ID NO: 3765 - RNA, 136 nt, synthetic construct
  source 1..136: mol_type = other RNA
gaagcgggcggagccggctggttttagagctagaaatagcaagttaaaataaggctagtccgttatcaacttgaaaaagtggcaccgagtcggtgcactccggggccccgttggaagactgagtgcccggctccgc

SEQ ID NO: 3766 - RNA, 135 nt, synthetic construct
  source 1..135: mol_type = other RNA
gaagcgggcggagccggctggttttagagctagaaatagcaagttaaaataaggctagtccgttatcaacttgaaaaagtggcaccgagtcggtgcactccggggccccgttggaagactgagtgcccggctccg

SEQ ID NO: 3767 - RNA, 134 nt, synthetic construct
  source 1..134: mol_type = other RNA
gaagcgggcggagccggctggttttagagctagaaatagcaagttaaaataaggctagtccgttatcaacttgaaaaagtggcaccgagtcggtgcactccggggccccgttggaagactgagtgcccggctcc

SEQ ID NO: 3768 - RNA, 138 nt, synthetic construct
  source 1..138: mol_type = other RNA
gaagcgggcggagccggctggttttagagctagaaatagcaagttaaaataaggctagtccgttatcaacttgaaaaagtggcaccgagtcggtgcgactccggggccccgttggaagactgagtgccggctccgccc

SEQ ID NO: 3769 - RNA, 137 nt, synthetic construct
  source 1..137: mol_type = other RNA
gaagcgggcggagccggctggttttagagctagaaatagcaagttaaaataaggctagtccgttatcaacttgaaaaagtggcaccgagtcggtgcgactccggggccccgttggaagactgagtgccggctccgcc

SEQ ID NO: 3770 - RNA, 136 nt, synthetic construct
  source 1..136: mol_type = other RNA
gaagcgggcggagccggctggttttagagctagaaatagcaagttaaaataaggctagtccgttatcaacttgaaaaagtggcaccgagtcggtgcgactccggggccccgttggaagactgagtgccggctccgc

SEQ ID NO: 3771 - RNA, 135 nt, synthetic construct
  source 1..135: mol_type = other RNA
gaagcgggcggagccggctggttttagagctagaaatagcaagttaaaataaggctagtccgttatcaacttgaaaaagtggcaccgagtcggtgcgactccggggccccgttggaagactgagtgccggctccg

SEQ ID NO: 3772 - RNA, 134 nt, synthetic construct
  source 1..134: mol_type = other RNA
gaagcgggcggagccggctggttttagagctagaaatagcaagttaaaataaggctagtccgttatcaacttgaaaaagtggcaccgagtcggtgcgactccggggccccgttggaagactgagtgccggctcc

SEQ ID NO: 3773 - protein, 17 aa, synthetic construct
KRTADGSEFEPKKKRKV

SEQ ID NO: 3774 - protein, 19 aa, synthetic construct
NLSKRPAAIKKAGQAKKKK

SEQ ID NO: 3775 - protein, 38 aa, synthetic construct
NQSSNFGPMKGGNFGGRSSGPYGGGGQYFAKPRNQGGY

SEQ ID NO: 3776 - protein, 16 aa, synthetic construct
KRXXXXXXXXXXKKKL

SEQ ID NO: 3777 - protein, 16 aa, synthetic construct
KRPAATKKAGQAKKKK

SEQ ID NO: 3778 - protein, 11 aa, synthetic construct
RQRRNELKRSF

SEQ ID NO: 3779 - RNA, 99 nt, synthetic construct
  source 1..99: mol_type = other RNA
  misc_feature 1..99: note = This sequence may encompass 1-33 CAG repeats
cagcagcagcagcagcagcagcagcagcagcagcagcagcagcagcagcagcagcagcagcagcagcagcagcagcagcagcagcagcagcagcagcag

SEQ ID NO: 3780 - RNA, 99 nt, synthetic construct
  source 1..99: mol_type = other RNA
  misc_feature 1..99: note = This sequence may encompass 1-33 CUG repeats
ctgctgctgctgctgctgctgctgctgctgctgctgctgctgctgctgctgctgctgctgctgctgctgctgctgctgctgctgctgctgctgctgctg

SEQ ID NO: 3781 - RNA, 145 nt, synthetic construct
  source 1..145: mol_type = other RNA
ggccggcgaacggggctcgagttttagagctagaaatagcaagttaaaataaggctagtccgttatcaacttgaaaaagtggcaccgagtcggtgcggcttgtcgacgacggcggtctccgtcgtcaggatcatagccccgttcg

SEQ ID NO: 3782 - DNA, 150 bp, Homo sapiens
  source 1..150: mol_type = genomic DNA
  misc_feature 1..150: note = This sequence may encompass 35-50 CTG repeats
ctgctgctgctgctgctgctgctgctgctgctgctgctgctgctgctgctgctgctgctgctgctgctgctgctgctgctgctgctgctgctgctgctgctgctgctgctgctgctgctgctgctgctgctgctgctgctgctgctgctg

SEQ ID NO: 3783-3784 - skipped (2 entries)

SEQ ID NO: 3785 - DNA, 136 bp, synthetic construct
  source 1..136: mol_type = other DNA
cagctccagtcctgtgatccgttttagagctagaaatagcaagttaaaataaggctagtccgttatcaacttgaaaaagtggcaccgagtcggtgcgtgatccaagtgctcgacactcccacgggttcacaggact

SEQ ID NO: 3786 - DNA, 102 bp, Homo sapiens
  source 1..102: mol_type = genomic DNA
  misc_feature 1..102: note = This sequence may encompass 5-34 CTG repeats
ctgctgctgctgctgctgctgctgctgctgctgctgctgctgctgctgctgctgctgctgctgctgctgctgctgctgctgctgctgctgctgctgctgctg

SEQ ID NO: 3787 - DNA, 3000 bp, Homo sapiens
  source 1..3000: mol_type = genomic DNA
  misc_feature 1..3000: note = This sequence may encompass 100-1000 CTG repeats
ctgctgctgctgctgctgctgctgctgctgctgctgctgctgctgctgctgctgctgctgctgctgctgctgctgctgctgctgctgctgctgctgctgctgctgctgctgctgctgctgctgctgctgctgctgctgctgctgctgctgctgctgctgctgctgctgctgctgctgctgctgctgctgctgctgctgctgctgctgctgctgctgctgctgctgctgctgctgctgctgctgctgctgctgctgctgctgctgctgctgctgctgctgctgctgctgctgctgctgctgctgctgctgctgctgctgctgctgctgctgctgctgctgctgctgctgctgctgctgctgctgctgctgctgctgctgctgctgctgctgctgctgctgctgctgctgctgctgctgctgctgctgctgctgctgctgctgctgctgctgctgctgctgctgctgctgctgctgctgctgctgctgctgctgctgctgctgctgctgctgctgctgctgctgctgctgctgctgctgctgctgctgctgctgctgctgctgctgctgctgctgctgctgctgctgctgctgctgctgctgctgctgctgctgctgctgctgctgctgctgctgctgctgctgctgctgctgctgctgctgctgctgctgctgctgctgctgctgctgctgctgctgctgctgctgctgctgctgctgctgctgctgctgctgctgctgctgctgctgctgctgctgctgctgctgctgctgctgctgctgctgctgctgctgctgctgctgctgctgctgctgctgctgctgctgctgctgctgctgctgctgctgctgctgctgctgctgctgctgctgctgctgctgctgctgctgctgctgctgctgctgctgctgctgctgctgctgctgctgctgctgctgctgctgctgctgctgctgctgctgctgctgctgctgctgctgctgctgctgctgctgctgctgctgctgctgctgctgctgctgctgctgctgctgctgctgctgctgctgctgctgctgctgctgctgctgctgctgctgctgctgctgctgctgctgctgctgctgctgctgctgctgctgctgctgctgctgctgctgctgctgctgctgctgctgctgctgctgctgctgctgctgctgctgctgctgctgctgctgctgctgctgctgctgctgctgctgctgctgctgctgctgctgctgctgctgctgctgctgctgctgctgctgctgctgctgctgctgctgctgctgctgctgctgctgctgctgctgctgctgctgctgctgctgctgctgctgctgctgctgctgctgctgctgctgctgctgctgctgctgctgctgctgctgctgctgctgctgctgctgctgctgctgctgctgctgctgctgctgctgctgctgctgctgctgctgctgctgctgctgctgctgctgctgctgctgctgctgctgctgctgctgctgctgctgctgctgctgctgctgctgctgctgctgctgctgctgctgctgctgctgctgctgctgctgctgctgctgctgctgctgctgctgctgctgctgctgctgctgctgctgctgctgctgctgctgctgctgctgctgctgctgctgctgctgctgctgctgctgctgctgctgctgctgctgctgctgctgctgctgctgctgctgctgctgctgctgctgctgctgctgctgctgctgctgctgctgctgctgctgctgctgctgctgctgctgctgctgctgctgctgctgctgctgctgctgctgctgctgctgctgctgctgctgctgctgctgctgctgctgctgctgctgctgctgctgctgctgctgctgctgctgctgctgctgctgctgctgctgctgctgctgctgctgctgctgctgctgctgctgctgctgctgctgctgctgctgctgctgctgctgctgctgctgctgctgctgctgctgctgctgctgctgctgctgctgctgctgctgctgctgctgctgctgctgctgctgctgctgctgctgctgctgctgctgctgctgctgctgctgctgctgctgctgctgctgctgctgctgctgctgctgctgctgctgctgctgctgctgctgctgctgctgctgctgctgctgctgctgctgctgctgctgctgctgctgctgctgctgctgctgctgctgctgctgctgctgctgctgctgctgctgctgctgctgctgctgctgctgctgctgctgctgctgctgctgctgctgctgctgctgctgctgctgctgctgctgctgctgctgctgctgctgctgctgctgctgctgctgctgctgctgctgctgctgctgctgctgctgctgctgctgctgctgctgctgctgctgctgctgctgctgctgctgctgctgctgctgctgctgctgctgctgctgctgctgctgctgctgctgctgctgctgctgctgctgctgctgctgctgctgctgctgctgctgctgctgctgctgctgctgctgctgctgctgctgctgctgctgctgctgctgctgctgctgctgctgctgctgctgctgctgctgctgctgctgctgctgctgctgctgctgctgctgctgctgctgctgctgctgctgctgctgctgctgctgctgctgctgctgctgctgctgctgctgctgctgctgctgctgctgctgctgctgctgctgctgctgctgctgctgctgctgctgctgctgctgctgctgctgctgctgctgctgctgctgctgctgctgctgctgctgctgctgctgctgctgctgctgctgctgctgctgctgctgctgctgctgctgctgctgctgctgctgctgctgctgctgctgctgctgctgctgctgctgctgctgctgctgctgctgctgctgctgctgctgctgctgctgctgctgctgctgctgctgctgctgctgctgctg

SEQ ID NO: 3788 - DNA, 450 bp, Homo sapiens
  source 1..450: mol_type = genomic DNA
  misc_feature 1..450: note = This sequence may encompass 50-150 CTG repeats
ctgctgctgctgctgctgctgctgctgctgctgctgctgctgctgctgctgctgctgctgctgctgctgctgctgctgctgctgctgctgctgctgctgctgctgctgctgctgctgctgctgctgctgctgctgctgctgctgctgctgctgctgctgctgctgctgctgctgctgctgctgctgctgctgctgctgctgctgctgctgctgctgctgctgctgctgctgctgctgctgctgctgctgctgctgctgctgctgctgctgctgctgctgctgctgctgctgctgctgctgctgctgctgctgctgctgctgctgctgctgctgctgctgctgctgctgctgctgctgctgctgctgctgctgctgctgctgctgctgctgctgctgctgctgctgctgctgctgctgctgctgctgctgctgctgctgctgctgctgctg

SEQ ID NO: 3789 - DNA, 147 bp, Homo sapiens
  source 1..147: mol_type = genomic DNA
  misc_feature 1..147: note = This sequence may encompass 35-49 CTG repeats
ctgctgctgctgctgctgctgctgctgctgctgctgctgctgctgctgctgctgctgctgctgctgctgctgctgctgctgctgctgctgctgctgctgctgctgctgctgctgctgctgctgctgctgctgctgctgctgctgctg

SEQ ID NO: 3790 - DNA, 3000 bp, Homo sapiens; identical to SEQ ID NO: 3787
  source 1..3000: mol_type = genomic DNA
  misc_feature 1..3000: note = This sequence may encompass 50-1000 CTG repeats

SEQ ID NO: 3791 - DNA, 90 bp, Homo sapiens
  source 1..90: mol_type = genomic DNA
ctgctgctgctgctgctgctgctgctgctgctgctgctgctgctgctgctgctgctgctgctgctgctgctgctgctgctgctgctgctg

SEQ ID NO: 3792 - DNA, 60 bp, Homo sapiens
  source 1..60: mol_type = genomic DNA
ctgctgctgctgctgctgctgctgctgctgctgctgctgctgctgctgctgctgctgctg

SEQ ID NO: 3793 - DNA, 30 bp, Homo sapiens
  source 1..30: mol_type = genomic DNA
ctgctgctgctgctgctgctgctgctgctg

SEQ ID NO: 3794 - DNA, 15 bp, Homo sapiens
  source 1..15: mol_type = genomic DNA
ctgctgctgctgctg

SEQ ID NO: 3795 - DNA, 4800 bp, Homo sapiens
  source 1..4800: mol_type = genomic DNA
ctgctgctgctgctgctgctgctgctgctgctgctgctgctgctgctgctgctgctgctgctgctgctgctgctgctgctgctgctgctgctgctgctgctgctgctgctgctgctgctgctgctgctgctgctgctgctgctgctgctgctgctgctgctgctgctgctgctgctgctgctgctgctgctgctgctgctgctgctgctgctgctgctgctgctgctgctgctgctgctgctgctgctgctgctgctgctgctgctgctgctgctgctgctgctgctgctgctgctgctgctgctgctgctgctgctgctgctgctgctgctgctgctgctgctgctgctgctgctgctgctgctgctgctgctgctgctgctgctgctgctgctgctgctgctgctgctgctgctgctgctgctgctgctgctgctgctgctgctgctgctgctgctgctgctgctgctgctgctgctgctgctgctgctgctgctgctgctgctgctgctgctgctgctgctgctgctgctgctgctgctgctgctgctgctgctgctgctgctgctgctgctgctgctgctgctgctgctgctgctgctgctgctgctgctgctgctgctgctgctgctgctgctgctgctgctgctgctgctgctgctgctgctgctgctgctgctgctgctgctgctgctgctgctgctgctgctgctgctgctgctgctgctgctgctgctgctgctgctgctgctgctgctgctgctgctgctgctgctgctgctgctgctgctgctgctgctgctgctgctgctgctgctgctgctgctgctgctgctgctgctgctgctgctgctgctgctgctgctgctgctgctgctgctgctgctgctgctgctgctgctgctgctgctgctgctgctgctgctgctgctgctgctgctgctgctgctgctgctgctgctgctgctgctgctgctgctgctgctgctgctgctgctgctgctgctgctgctgctgctgctgctgctgctgctgctgctgctgctgctgctgctgctgctgctgctgctgctgctgctgctgctgctgctgctgctgctgctgctgctgctgctgctgctgctgctgctgctgctgctgctgctgctgctgctgctgctgctgctgctgctgctgctgctgctgctgctgctgctgctgctgctgctgctgctgctgctgctgctgctgctgctgctgctgctgctgctgctgctgctgctgctgctgctgctgctgctgctgctgctgctgctgctgctgctgctgctgctgctgctgctgctgctgctgctgctgctgctgctgctgctgctgctgctgctgctgctgctgctgctgctgctgctgctgctgctgctgctgctgctgctgctgctgctgctgctgctgctgctgctgctgctgctgctgctgctgctgctgctgctgctgctgctgctgctgctgctgctgctgctgctgctgctgctgctgctgctgctgctgctgctgctgctgctgctgctgctgctgctgctgctgctgctgctgctgctgctgctgctgctgctgctgctgctgctgctgctgctgctgctgctgctgctgctgctgctgctgctgctgctgctgctgctgctgctgctgctgctgctgctgctgctgctgctgctgctgctgctgctgctgctgctgctgctgctgctgctgctgctgctgctgctgctgctgctgctgctgctgctgctgctgctgctgctgctgctgctgctgctgctgctgctgctgctgctgctgctgctgctgctgctgctgctgctgctgctgctgctgctgctgctgctgctgctgctgctgctgctgctgctgctgctgctgctgctgctgctgctgctgctgctgctgctgctgctgctgctgctgctgctgctgctgctgctgctgctgctgctgctgctgctgctgctgctgctgctgctgctgctgctgctgctgctgctgctgctgctgctgctgctgctgctgctgctgctgctgctgctgctgctgctgctgctgctgctgctgctgctgctgctgctgctgctgctgctgctgctgctgctgctgctgctgctgctgctgctgctgctgctgctgctgctgctgctgctgctgctgctgctgctgctgctgctgctgctgctgctgctgctgctgctgctgctgctgctgctgctgctgctgctgctgctgctgctgctgctgctgctgctgctgctgctgctgctgctgctgctgctgctgctgctgctgctgctgctgctgctgctgctgctgctgctgctgctgctgctgctgctgctgctgctgctgctgctgctgctgctgctgctgctgctgctgctgctgctgctgctgctgctgctgctgctgctgctgctgctgctgctgctgctgctgctgctgctgctgctgctgctgctgctgctgctgctgctgctgctgctgctgctgctgctgctgctgctgctgctgctgctgctgctgctgctgctgctgctgctgctgctgctgctgctgctgctgctgctgctgctgctgctgctgctgctgctgctgctgctgctgctgctgctgctgctgctgctgctgctgctgctgctgctgctgctgctgctgctgctgctgctgctgctgctgctgctgctgctgctgctgctgctgctgctgctgctgctgctgctgctgctgctgctgctgctgctgctgctgctgctgctgctgctgctgctgctgctgctgctgctgctgctgctgctgctgctgctgctgctgctgctgctgctgctgctgctgctgctgctgctgctgctgctgctgctgctgctgctgctgctgctgctgctgctgctgctgctgctgctgctgctgctgctgctgctgctgctgctgctgctgctgctgctgctgctgctgctgctgctgctgctgctgctgctgctgctgctgctgctgctgctgctgctgctgctgctgctgctgctgctgctgctgctgctgctgctgctgctgctgctgctgctgctgctgctgctgctgctgctgctgctgctgctgctgctgctgctgctgctgctgctgctgctgctgctgctgctgctgctgctgctgctgctgctgctgctgctgctgctgctgctgctgctgctgctgctgctgctgctgctgctgctgctgctgctgctgctgctgctgctgctgctgctgctgctgctgctgctgctgctgctgctgctgctgctgctgctgctgctgctgctgctgctgctgctgctgctgctgctgctgctgctgctgctgctgctgctgctgctgctgctgctgctgctgctgctgctgctgctgctgctgctgctgctgctgctgctgctgctgctgctgctgctgctgctgctgctgctgctgctgctgctgctgctgctgctgctgctgctgctgctgctgctgctgctgctgctgctgctgctgctgctgctgctgctgctgctgctgctgctgctgctgctgctgctgctgctgctgctgctgctgctgctgctgctgctgctgctgctgctgctgctgctgctgctgctgctgctgctgctgctgctgctgctgctgctgctgctgctgctgctgctgctgctgctgctgctgctgctgctgctgctgctgctgctgctgctgctgctgctgctgctgctgctgctgctgctgctgctgctgctgctgctgctgctgctgctgctgctgctgctgctgctgctgctgctgctgctgctgctgctgctgctgctgctgctgctgctgctgctgctgctgctgctgctgctgctgctgctgctgctgctgctgctgctgctgctgctgctgctgctgctgctgctgctgctgctgctgctgctgctgctgctgctgctgctgctgctgctgctgctgctgctgctgctgctgctgctgctgctgctgctgctgctgctgctgctgctgctgctgctgctgctgctgctgctgctgctgctgctgctgctgctgctgctgctgctgctgctgctgctgctgctgctgctgctgctgctgctgctgctgctgctgctgctgctgctgctgctgctgctgctgctgctgctgctgctgctgctgctgctgctgctgctgctgctgctgctgctgctgctgctgctgctgctgctgctgctgctgctgctgctgctgctgctgctgctgctgctgctgctgctgctgctgctgctgctgctgctgctgctgctgctgctgctgctgctgctgctgctgctgctgctgctgctgctgctgctgctgctgctgctgctgctgctgctgctgctgctgctgctgctgctgctgctgctgctgctgctgctgctgctgctgctgctgctgctgctgctgctgctgctgctgctgctgctgctgctgctgctgctgctgctgctgctgctgctgctgctgctgctgctgctgctgctgctgctgctgctgctgctgctgctgctgctgctgctgctgctgctgctgctgctgctgctgctgctgctgctgctgctgctgctgctgctgctgctgctgctgctgctgctgctgctgctgctgctgctgctgctgctgctgctgctgctgctgctgctgctgctgctgctgctgctgctgctgctgctgctgctgctgctgctgctgctgctgctgctgctgctgctgctgctgctgctgctgctgctgctgctgctgctgctg

SEQ ID NO: 3796 - DNA, 3450 bp, Homo sapiens
  source 1..3450: mol_type = genomic DNA
ctgctgctgctgctgctgctgctgctgctgctgctgctgctgctgctgctgctgctgctgctgctgctgctgctgctgctgctgctgctgctgctgctgctgctgctgctgctgctgctgctgctgctgctgctgctgctgctgctgctgctgctgctgctgctgctgctgctgctgctgctgctgctgctgctgctgctgctgctgctgctgctgctgctgctgctgctgctgctgctgctgctgctgctgctgctgctgctgctgctgctgctgctgctgctgctgctgctgctgctgctgctgctgctgctgctgctgctgctgctgctgctgctgctgctgctgctgctgctgctgctgctgctgctgctgctgctgctgctgctgctgctgctgctgctgctgctgctgctgctgctgctgctgctgctgctgctgctgctgctgctgctgctgctgctgctgctgctgctgctgctgctgctgctgctgctgctgctgctgctgctgctgctgctgctgctgctgctgctgctgctgctgctgctgctgctgctgctgctgctgctgctgctgctgctgctgctgctgctgctgctgctgctgctgctgctgctgctgctgctgctgctgctgctgctgctgctgctgctgctgctgctgctgctgctgctgctgctgctgctgctgctgctgctgctgctgctgctgctgctgctgctgctgctgctgctgctgctgctgctgctgctgctgctgctgctgctgctgctgctgctgctgctgctgctgctgctgctgctgctgctgctgctgctgctgctgctgctgctgctgctgctgctgctgctgctgctgctgctgctgctgctgctgctgctgctgctgctgctgctgctgctgctgctgctgctgctgctgctgctgctgctgctgctgctgctgctgctgctgctgctgctgctgctgctgctgctgctgctgctgctgctgctgctgctgctgctgctgctgctgctgctgctgctgctgctgctgctgctgctgctgctgctgctgctgctgctgctgctgctgctgctgctgctgctgctgctgctgctgctgctgctgctgctgctgctgctgctgctgctgctgctgctgctgctgctgctgctgctgctgctgctgctgctgctgctgctgctgctgctgctgctgctgctgctgctgctgctgctgctgctgctgctgctgctgctgctgctgctgctgctgctgctgctgctgctgctgctgctgctgctgctgctgctgctgctgctgctgctgctgctgctgctgctgctgctgctgctgctgctgctgctgctgctgctgctgctgctgctgctgctgctgctgctgctgctgctgctgctgctgctgctgctgctgctgctgctgctgctgctgctgctgctgctgctgctgctgctgctgctgctgctgctgctgctgctgctgctgctgctgctgctgctgctgctgctgctgctgctgctgctgctgctgctgctgctgctgctgctgctgctgctgctgctgctgctgctgctgctgctgctgctgctgctgctgctgctgctgctgctgctgctgctgctgctgctgctgctgctgctgctgctgctgctgctgctgctgctgctgctgctgctgctgctgctgctgctgctgctgctgctgctgctgctgctgctgctgctgctgctgctgctgctgctgctgctgctgctgctgctgctgctgctgctgctgctgctgctgctgctgctgctgctgctgctgctgctgctgctgctgctgctgctgctgctgctgctgctgctgctgctgctgctgctgctgctgctgctgctgctgctgctgctgctgctgctgctgctgctgctgctgctgctgctgctgctgctgctgctgctgctgctgctgctgctgctgctgctgctgctgctgctgctgctgctgctgctgctgctgctgctgctgctgctgctgctgctgctgctgctgctgctgctgctgctgctgctgctgctgctgctgctgctgctgctgctgctgctgctgctgctgctgctgctgctgctgctgctgctgctgctgctgctgctgctgctgctgctgctgctgctgctgctgctgctgctgctgctgctgctgctgctgctgctgctgctgctgctgctgctgctgctgctgctgctgctgctgctgctgctgctgctgctgctgctgctgctgctgctgctgctgctgctgctgctgctgctgctgctgctgctgctgctgctgctgctgctgctgctgctgctgctgctgctgctgctgctgctgctgctgctgctgctgctgctgctgctgctgctgctgctgctgctgctgctgctgctgctgctgctgctgctgctgctgctgctgctgctgctgctgctgctgctgctgctgctgctgctgctgctgctgctgctgctgctgctgctgctgctgctgctgctgctgctgctgctgctgctgctgctgctgctgctgctgctgctgctgctgctgctgctgctgctgctgctgctgctgctgctgctgctgctgctgctgctgctgctgctgctgctgctgctgctgctgctgctgctgctgctgctgctgctgctgctgctgctgctgctgctgctgctgctgctgctgctgctgctgctgctgctgctgctgctgctgctgctgctgctgctgctgctgctgctgctgctgctgctgctgctgctgctgctgctgctgctgctgctgctgctgctgctgctgctgctgctgctgctgctgctgctgctgctgctgctgctgctgctgctgctgctgctgctgctgctgctgctgctgctgctgctgctgctgctgctgctgctgctgctgctgctgctgctgctgctgctgctgctgctgctgctgctgctgctgctgctgctgctgctgctgctgctgctgctgctgctgctgctgctgctgctgctgctgctgctgctgctgctgctgctgctgctgctgctgctgctgctgctgctgctgctgctgctgctgctgctgctgctgctgctgctgctgctgctgctgctgctgctgctgctgctgctgctgctgctgctgctgctgctgctgctgctgctgctgctgctgctgctgctgctgctgctgctgctgctgctgctgctgctgctgctgctgctgctgctgctgctgctgctgctgctgctgctgctgctgctgctgctgctgctgctgctgctgctgctgctgctgctgctgctgctgctgctgctgctgctgctgctgctgctgctgctgctgctgctgctgctgctgctgctgctgctgctgctgctgctgctgctgctgctgctgctgctgctgctgctgctgctgctgctgctg

SEQ ID NO: 3797 - DNA, 714 bp, Homo sapiens
  source 1..714: mol_type = genomic DNA
ctgctgctgctgctgctgctgctgctgctgctgctgctgctgctgctgctgctgctgctgctgctgctgctgctgctgctgctgctgctgctgctgctgctgctgctgctgctgctgctgctgctgctgctgctgctgctgctgctgctgctgctgctgctgctgctgctgctgctgctgctgctgctgctgctgctgctgctgctgctgctgctgctgctgctgctgctgctgctgctgctgctgctgctgctgctgctgctgctgctgctgctgctgctgctgctgctgctgctgctgctgctgctgctgctgctgctgctgctgctgctgctgctgctgctgctgctgctgctgctgctgctgctgctgctgctgctgctgctgctgctgctgctgctgctgctgctgctgctgctgctgctgctgctgctgctgctgctgctgctgctgctgctgctgctgctgctgctgctgctgctgctgctgctgctgctgctgctgctgctgctgctgctgctgctgctgctgctgctgctgctgctgctgctgctgctgctgctgctgctgctgctgctgctgctgctgctgctgctgctgctgctgctgctgctgctgctgctgctgctgctgctgctgctgctgctgctgctgctgctgctgctgctgctgctgctgctgctgctgctgctgctgctgctgctgctgctgctg

What is claimed is:

1. A prime editing composition comprising (A) a first prime editing guide RNA (PEgRNA) or one or more polynucleotides encoding the first PEgRNA and (B) a second PEgRNA or one or more polynucleotides encoding the second PEgRNA,
wherein the first PEgRNA comprises:
(i) a first spacer that is complementary to a first search target sequence on a first strand of a DMPK gene,
(ii) a first gRNA core capable of binding to a Cas9 protein; and
(iii) a first extension arm comprising a first editing template and a first primer binding site (PBS),
wherein the first spacer comprises at its 3′ end nucleotides 5-20 of a sequence selected from the group consisting of SEQ ID NOs: 1, 20, 39, 58, 77, 484, 518, 536, 554, 572, 590, 912, 929, 947, 965, 983, 1001, 1019, and 1341, and wherein the first PBS comprises at its 5′ end a sequence that is the reverse complement of nucleotides 15-17 of the selected sequence;
wherein the second PEgRNA comprises:
(i) a second spacer that is complementary to a second search target sequence on a second strand of the DMPK gene complementary to the first strand,
(ii) a second gRNA core capable of binding to a Cas9 protein; and
(iii) a second extension arm comprising a second editing template and a second PBS,
wherein the second spacer comprises at its 3′ end nucleotides 5-20 of a sequence selected from the group consisting of SEQ ID NOs: 1359, 1381, 1403, 1503, 1525, 1864, 1882, 1900, 1918, 1936, 2263, 2281, 2299, 2317, 2335, 2353, 2673, and wherein the second PBS comprises at its 5′ end a sequence that is the reverse complement of nucleotides 15-17 of the selected sequence;
and wherein
(a) the first editing template comprises a region of complementarity to the second editing template;
(b) the first editing template comprises nucleotides 8-17 of the selected sequence for the second spacer, and the second editing template comprises nucleotides 8-17 of the selected sequence for the first spacer; or
(c) the first editing template comprises nucleotides 8-17 of the selected sequence for the second spacer, and a region of complementarity to the second editing template, and the second editing template comprises nucleotides 8-17 of the selected sequence for the first spacer, and a region of complementarity to the first editing template.

2. The prime editing composition of claim 1, wherein the selected sequence for the first spacer is SEQ ID NOs: 77, 484, 536, 590, or 1019.

3. The prime editing composition of claim 1 or 2, wherein the selected sequence for the second spacer is SEQ ID NO: 1525, 1900, 1936, 2263, 2281, 2299, 2353, or 2673.

4. The prime editing composition of any one of claims 1-3, wherein the selected sequence for the first spacer is SEQ ID NO: 77, 536, or 1019.

5. The prime editing composition of any one of claims 1-4, wherein the selected sequence for the second spacer is SEQ ID NO: 1900, 1936, or 2673.

6. The prime editing composition of any one of claims 1-5, wherein the first spacer and/or the second spacer is from 16 to 22 nucleotides in length.

7. The prime editing composition of any one of claims 1-6, wherein the first spacer and/or the second spacer comprises at its 3′ the selected sequence.

8. The prime editing composition of claim 7, wherein the first spacer and/or the second spacer is 20 nucleotides in length and comprises the selected sequence.

9. The prime editing composition of any one of claims 1-8, wherein the first gRNA core and the second gRNA core comprise the same sequence.

10. The prime editing composition of claim 9, wherein the first gRNA core and the second gRNA core each comprises SEQ ID NO: 3641.

11. The prime editing composition of any one of claims 1-10, wherein the first spacer, the first gRNA core, the first editing template, and the first PBS form a contiguous sequence in a single molecule.

12. The prime editing composition of claim 11, wherein the first PEgRNA comprises from 5′ to 3′ the first spacer, the first gRNA core, the first editing template, and the first PBS.

13. The prime editing composition of any one of claims 1-12, wherein the second spacer, the second gRNA core, the second editing template, and the second PBS form a contiguous sequence in a single molecule.

14. The prime editing composition of claim 13, wherein the second pegRNA comprises from 5′ to 3′ the second spacer, the second gRNA core, the second editing template, and the second PBS.

15. The prime editing composition of any one of claims 1-14, where in the first PBS is at least 8 nucleotides in length and comprises at its 5′ end a sequence that is the reverse complement of nucleotides 10-17 of the selected sequence for the first spacer.

16. The prime editing composition of claim 15, wherein the first PBS is 8-17 nucleotides in length and comprises at its 5′ end a sequence that is the reverse complement of nucleotides 10-17, 9-17, 8-17, 7-17, 6-17, 5-17, 4-17, 3-17, 2-17, or 1-17 of the selected sequence for the first spacer.

17. The prime editing composition of claim 16, wherein the first PBS is 8-14 nucleotides in length.

18. The prime editing composition of claim 16, wherein the first PBS is 8-12 nucleotides in length.

19. The prime editing composition of claim 16, wherein the first PBS is 8-10 nucleotides in length.

20. The prime editing composition of claim 16, wherein the first PBS is 8-9 nucleotides in length.

21. The prime editing composition of claim 16, wherein the first PBS is 10 nucleotides in length.

22. The prime editing composition of any one of claims 1-21, where in the second PBS is at least 8 nucleotides in length and comprises at its 5′ end a sequence that is the reverse complement of nucleotides 10-17 of the selected sequence for the second spacer.

23. The prime editing composition of claim 22, wherein the second PBS is 8-17 nucleotides in length and comprises at its 5′ end a sequence that is the reverse complement of nucleotides 10-17, 9-17, 8-17, 7-17, 6-17, 5-17, 4-17, 3-17, 2-17, or 1-17 of the selected sequence for the second spacer.

24. The prime editing composition of claim 23, wherein the second PBS is 8-14 nucleotides in length.

25. The prime editing composition of claim 23, wherein the second PBS is 8-12 nucleotides in length.

26. The prime editing composition of claim 23, wherein the second PBS is 8-10 nucleotides in length.

27. The prime editing composition of claim 23, wherein the second PBS is 8-9 nucleotides in length.

28. The prime editing composition of claim 23, wherein the second PBS is 10 nucleotides in length.

29. The prime editing composition of any one of claims 1-28, wherein the first editing template comprises a region of complementarity to the second editing template.

30. The prime editing composition of claim 29, wherein the region of complementarity is about 20 to about 80 nucleotides in length.

31. The prime editing composition of claim 29, wherein the region of complementarity is about 20 to about 40 nucleotides in length.

32. The prime editing composition of claim 29, wherein the region of complementarity is 23-38 nucleotides in length.

33. The prime editing composition of claim 29, wherein the GC content of the region of complementarity is about 40% to about 80%.

34. The prime editing composition of claim 29, wherein the GC content of the region of complementarity is about 50% to about 80%.

35. The prime editing composition of claim 29, wherein the GC content of the region of complementarity is about 60% to about 80%.

36. The prime editing composition of claim 29, wherein the GC content of the region of complementarity is at least 63%.

37. The prime editing composition of claim 29, wherein the GC content of the region of complementarity is 63%-79%.

38. The prime editing composition of any one of claims 29-37, wherein the first editing template comprises SEQ ID NO: 2691.

39. The prime editing composition of any one of claims 29-38, wherein the second editing template comprises SEQ ID NO: 3075.

40. The prime editing composition of any one of claims 29-37, where in the first editing template comprises a sequence selected from the group consisting of SEQ ID NOs: 2692-2736.

41. The prime editing composition of any one of claims 29-37 and 40, wherein the second editing template comprises a sequence selected from the group consisting of SEQ ID NOs: 3076-3120.

42. The prime editing composition of any one of claims 29-37, wherein the first editing template comprises a sequence selected from the group consisting of SEQ ID NOs: 2737-2769.

43. The prime editing composition of any one of claims 29-37 and 42, wherein the second editing template comprises a sequence selected from the group consisting of SEQ ID NOs: 3121-3153.

44. The prime editing composition of any one of claims 29-43, wherein:
(i) the first spacer comprises SEQ ID NO: 77, and the first PBS comprises SEQ ID No: 85,
(ii) the first spacer comprises SEQ ID NO: 536, and the first PBS comprises SEQ ID No: 544,
or
(iii) the first spacer comprises SEQ ID NO: 1019, and the first PBS comprises SEQ ID No:1027;
and wherein:
(i) the second spacer comprises SEQ ID NO: 1900, and the second PBS comprises SEQ ID NO: 1908,
(ii) the second spacer comprises SEQ ID NO: 1936, and the second PBS comprises SEQ ID NO: 1944,
or
(iii) the second spacer comprises SEQ ID NO: 2673, and the second PBS comprises SEQ ID NO: 2681.

45. The prime editing composition of any one of claims 29-43, wherein the first spacer comprises SEQ ID No: 77, and the first PBS is 8-10 nucleotides in length and comprises SEQ ID NOs: 87, 86, or 85.

46. The prime editing composition of claim 45, wherein the second spacer comprises SEQ ID NO: 1936, and the second PBS is 8-10 nucleotides in length and comprises SEQ ID NOs: 1946, 1945, or 1944.

47. The prime editing composition of any one of claims 44-46, wherein the first PEgRNA comprises a sequence selected from the group consisting of SEQ ID NOs: 93-102, 552, 553, 1035, and 1036, and wherein the second PEgRNA comprises a sequence selected from the group consisting of SEQ ID NOs: 1952-1961, 1916, 1917, 2689, and 2690.

48. The prime editing composition of any one of claims 44-47, wherein the first PEgRNA comprises a sequence selected from the group consisting of SEQ ID NOs: 94, 552, and 1035; and wherein the second PEgRNA comprises a sequence selected from the group consisting of 1952, 1916, and 2689.

49. The prime editing composition of any one of claims 29-48, wherein the first editing template and the second editing template have the same length and are perfectly complementary to each other.

50. The prime editing composition of any one of claims 1-28, wherein the first editing template comprises at its 3′ end nucleotides 8-17 of the selected sequence for the second spacer, and wherein the second editing template comprises at its 3′ end nucleotides 8-17 of the selected sequence of the first spacer.

51. The prime editing composition of claim 50, wherein the first editing template comprises at its 3′ end nucleotides 1-17, 2-17, 3-17, 4-17, 5-17, 6-17, 7-17, or 8-17 of the selected sequence for the second spacer, and/or wherein the second editing template comprises at its 3′ end nucleotides 1-17, 2-17, 3-17, 4-17, 5-17, 6-17, 7-17, or 8-17 of the selected sequence for the first spacer.

52. The prime editing composition of claim 50, wherein the first editing template comprises at its 3′ end nucleotides 3-17 of the selected sequence for the second spacer, and wherein the second editing template comprises at its 3′ end nucleotides 3-17 of the selected sequence of the first spacer.

53. The prime editing composition of claim 52, wherein the first editing template comprises a region of complementarity to a sequence on the second strand of the DMPK gene that is directly 3′ to nucleotide 3 of the second search target sequence, wherein the region of complementarity is about 20, about 25, about 30 about 35, about 40, about 45, about 50 nucleotides in length.

54. The prime editing composition of claim 53, wherein the region of complementarity is about 20-30 nucleotides in length.

55. The prime editing composition of claim 52, wherein the second editing template comprises a region of complementarity to a sequence on the first strand of the DMPK gene that is directly 3′ to nucleotide 3 of the first search target sequence, wherein the region of complementarity is about 20, about 25, about 30, about 35, about 40, about 45, or about 50 nucleotides in length.

56. The prime editing composition of claim 55, wherein the region of complementarity is about 20-30 nucleotides in length.

57. The prime editing composition of any one of claims 50-56, wherein the first editing template comprises a sequence selected from the group consisting of SEQ ID NOs: 3459-3461, wherein the second spacer comprises at its 3′ end nucleotides 5-20 of SEQ ID NO: 1525, optionally wherein the second spacer comprises at its 3 end SEQ ID NO: 1525.

58. The prime editing composition of any one of claims 50-57, wherein the second editing template comprises a sequence selected from the group consisting of SEQ ID NOs: 3477-3479, wherein the first spacer comprises at its 3′ end nucleotides 5-20 of SEQ ID NO: 484, optionally wherein the first spacer comprises at its 3′ end SEQ ID NO: 484.

59. The prime editing composition of claim 57 or 58, wherein the first PEgRNA comprises a sequence selected from the group consisting of SEQ ID NOs: 503-517, and wherein the second PEgRNA comprises a sequence selected from the group consisting of SEQ ID NOs: 1548-1562.

60. The prime editing composition of any one of claims 1-28, wherein the first editing template comprises from 5′ to 3′ (i) a region of complementarity to the second editing template and (ii) nucleotides 8-17 of the selected sequence for the second spacer; and wherein the second editing template comprises from 5′ to 3′ (i) a region of complementarity to the first editing template and (ii) nucleotides 8-17 of the selected sequence for the first spacer.

61. The prime editing composition of claim 60, wherein the first editing template comprises nucleotides 1-17, 2-17, 3-17, 4-17, 5-17, 6-17, 7-17, or 8-17 of the selected sequence for the second spacer, and/or wherein the second editing template comprises 1-17, 2-17, 3-17, 4-17, 5-17, 6-17, 7-17, or 8-17 of the selected sequence for the first spacer.

62. The prime editing composition of claim 60, wherein the first editing template comprises nucleotides 3-17 of the selected sequence for the second spacer, and wherein the second editing template comprises nucleotides 3-17 of the selected sequence of the first spacer.

63. The prime editing composition of claim 60, wherein the first editing template comprises a region of complementarity to a sequence on the second strand of the DMPK gene that is directly 3′ to nucleotide 3 of the second search target sequence, wherein the region of complementarity is about 20, about 25, about 30, about 35, about 40, about 45, or about 50 nucleotides in length.

64. The prime editing composition of claim 63, wherein the region of complementarity between the first editing template and the sequence on the second strand of the DMPK gene is about 20-30 nucleotides in length.

65. The prime editing composition of claim 60, wherein the second editing template comprises a region of complementarity to a sequence on the first strand of the DMPK gene that is directly 3′ to nucleotide 3 of the first search target sequence, wherein the region of complementarity is about 20, about 25, about 30, about 35, about 40, about 45, or about 50 nucleotides in length.

66. The prime editing composition of claim 65, wherein the region of complementarity between the second editing template and the sequence on the first strand of the DMPK gene is about 20-30 nucleotides in length.

67. The prime editing composition of any one of claims 60-66, wherein the region of complementarity between the first editing template and the second editing template is about 20 to about 80 nucleotides in length.

68. The prime editing composition of claim 67, wherein the region of complementarity between the first editing template and the second editing template is about 20 to about 40 nucleotides in length.

69. The prime editing composition of claim 67, wherein the region of complementarity between the first editing template and the second editing template is 23-38 nucleotides in length.

70. A prime editing composition comprising: a first prime editing guide RNA (PEgRNA) or one or more polynucleotides encoding the first PEgRNA and a second PEgRNA or one or more polynucleotides encoding the second PEgRNA, wherein
(a) the first PEgRNA comprises
(i) a first spacer comprising at its 3′ end nucleotides 5-20 of a Spacer sequence selected from any one of Tables 1A, 2A, 3A, 4A, 5A, 6A, 7A, 8A, 9A, 10A, 11A, 12A, 13A, 14A, 15A, 16A, 17A, 18A, and 19A;
(ii) a first gRNA core capable of binding to a Cas9 protein;
(iii) a first extension arm comprising
a first primer binding site (PBS) comprising a PBS sequence selected from the same Table as the first spacer, and
a first editing template comprising an RTT sequence selected from Table 37 and has an RTT Pairing NO: x in Table 37,
and
(b) the second PEgRNA comprises
(i) a second spacer comprising at its 3′ end nucleotides 5-20 of a Spacer sequence selected from any one of Tables 20A, 21A, 22A, 23A, 24A, 25A, 26A, 27A, 28A, 29A, 30A, 31A, 32A, 33A, 34A, 35A, and 36A;
(ii) a second gRNA core capable of binding to a Cas9 protein;
(iii) a second extension arm comprising
a second primer binding site (PBS) comprising a PBS sequence selected from the same Table as the second spacer, and
a second editing template comprising an RTT sequence selected from Table 38 and has an RTT pairing NO: x in Table 38,
wherein the RTT pairing number x in (a) and (b) are the same integer.

71. The prime editing composition of claim 70, wherein the first editing template and the second editing template have the same length and are perfectly complementary to each other.

72. A prime editing composition comprising a first prime editing guide RNA (PEgRNA) or one or more polynucleotides encoding the first PEgRNA and a second PEgRNA or one or more polynucleotides encoding the second PEgRNA, wherein
(a) the first PEgRNA comprises
(i) a first spacer comprising at its 3′ end nucleotides 5-20 of a Spacer sequence selected from Table xA, wherein x is an integer from 1 to 19;
(ii) a first gRNA core capable of binding to a Cas9 protein;
(iii) a first extension arm comprising
a first primer binding site (PBS) comprising a PBS sequence selected from the same Table as the first spacer, and
a first editing template comprising an RTT sequence selected from Table 39, wherein the Pairing Spacer number of the RTT sequence in Table 39 is y,
and
(b) the second PEgRNA comprises
(iv) a second spacer comprising at its 3′ end nucleotides 5-20 of a Spacer sequence selected from Table yA, wherein y is an integer from 20 to 36;
(v) a second gRNA core capable of binding to a Cas9 protein;
(vi) a second extension arm comprising
a second editing template comprising an RTT sequence selected from Table 40, wherein the Pairing Spacer number of the RTT sequence in Table 40 is x, and
a second primer binding site (PBS) comprising a PBS sequence selected from the same Table as the second spacer,
wherein x in (a) and (b) are the same integer, and wherein y in (a) and (b) are the same integer.

73. The prime editing composition of any one of claims 70-72, wherein the first spacer and/or the second spacer is from 16 to 22 nucleotides in length.

74. The prime editing composition of any one of claims 70-73, wherein the first spacer and/or the second spacer comprises at its 3′ the selected sequence.

75. The prime editing composition of claim 74, wherein the first spacer and/or the second spacer is 20 nucleotides in length.

76. The prime editing composition of any one of claims 70-75, wherein the first gRNA core and the second gRNA core comprise the same sequence.

77. The prime editing composition of claim 76, wherein the first gRNA core and the second gRNA core each comprises SEQ ID NO: 3641.

78. The prime editing composition of any one of claims 70-77, wherein the first spacer, the first gRNA core, the first editing template, and the first PBS form a contiguous sequence in a single molecule.

79. The prime editing composition of claim 78, wherein the first pegRNA comprises from 5′ to 3′ the first spacer, the first gRNA core, the first editing template, and the first PBS.

80. The prime editing composition of any one of claims 70-79, wherein the second spacer, the second gRNA core, the second editing template, and the second PBS form a contiguous sequence in a single molecule.

81. The prime editing composition of claim 80, wherein the second pegRNA comprises from 5′ to 3′ the second spacer, the second gRNA core, the second editing template, and the second PBS.

82. The prime editing composition of any one of claims 1-81, wherein the first PEgRNA and/or the second PEgRNA further comprises 3′ mN*mN*mN*N and 5′mN*mN*mN*modifications, where m indicates that the nucleotide contains a 2′-O-Me modification and a * indicates the presence of a phosphorothioate bond.

83. The prime editing composition of any one of claims 1-82, further comprising a prime editor or one or more polynucleotides encoding the prime editor, wherein the prime editor comprises a Cas9 nickase having a nuclease inactivating mutation in the HNH domain and a reverse transcriptase.

84. The prime editing composition of claim 83, wherein the Cas9 nickase comprises an amino acid sequence having at least 80%, 85%, 90%, 95%, 96%, 97%, 98%, 99%, or 100% identity to SEQ ID NO: 3582.

85. The prime editing composition of claim 83 or 84, wherein the reverse transcriptase comprises an amino acid sequence having at least 80%, 85%, 90%, 95%, 96%, 97%, 98%, 99%, or 100% identity to SEQ ID NO: 3579.

86. The prime editing system of claim 84 or 85, wherein the sequence identities are determined by Needleman-Wunsch alignment of two protein sequences with Gap Costs set to Existence: 11 Extension: 1 where percent identity is calculated by dividing the number of identities by the length of the alignment.

87. The prime editing composition of any one of claims 83-86, wherein the prime editor is a fusion protein.

88. The prime editing composition of any one of claims 83-86, wherein the one or more polynucleotides comprise (a) a first sequence encoding an N-terminal portion of the Cas9 nickase and an intein-N and (b) a second sequence encoding a intein-C, a C-terminal portion of the Cas9 nickase, and the reverse transcriptase.

89. The prime editing composition of any one of claims 83-88, comprising one or more vectors that comprises the one or more polynucleotides encoding the first PEgRNA, the one or more polynucleotides encoding the second PEgRNA, and the one or more polynucleotides encoding the prime editor.

90. The prime editing composition of claim 89, wherein the one or more vectors are AAV vectors.

91. An LNP comprising the prime editing composition of any one of claims 1-90.

92. A method of editing a DMPK gene, the method comprising contacting the DMPK gene with (a) the prime editing composition of any one of claims 1-82 and a prime editor comprising a Cas9 nickase having a nuclease inactivation mutation in the HNH domain and a reverse transcriptase, (b) the prime editing composition of any one of claims 83-90, or (c) the LNP of claim 91.

93. The method of claim 92, wherein the DMPK gene is in a cell.

94. The method of claim 93, wherein the cell is a mammalian cell.

95. The method of claim 94, wherein the cell is a human cell.

96. The method of any one of claims 93-95, wherein the cell is a fibroblast, a myoblast, a myosatellite, a muscle progenitor cell, a cardiomyocyte, a differentiated muscle cell, a skeletal muscle cell, or a smooth muscle cell.

97. The method of any one of claims 93-96, wherein the cell is in a subject.

98. The method of claim 97, wherein the subject is a human.

99. The method of any one of claims 93-98, wherein the cell is from a subject having myotonic dystrophy type 1.

100. A cell generated by the method of any one of claims 92-99.

101. A population of cells generated by the method of any one of claims 92-99.

102. A method for treating myotonic dystrophy type 1 in a subject in need thereof, the method comprising administering to the subject (a) the prime editing composition of any one of claims 1-82 and a prime editor comprising a Cas9 nickase having a nuclease inactivation mutation in the HNH domain and a reverse transcriptase, (b) the prime editing composition of any one of claims 83-90, (c) the LNP of claim 91, (d) the cell of claim 100, or (3) the population of cells of claim 101.
